(19) United States
(12) Patent Application Publication
(10) Pub. No.: US 2024/0318224 A1
(43) Pub. Date: Sep. 26, 2024

(54) METHOD OF TREATING DRUG RESISTANT ESKAPEE PATHOGENS USING THERAPEUTIC BACTERIOPHAGES

(71) Applicant: The Government of the United States, as Represented by the Secretary of the Army, FORT DETRICK, MD (US)

(72) Inventors: Andrey FILIPPOV, Germantown, MD (US); Mikeljon NIKOLICH, Tacoma Park, MD (US)

(21) Appl. No.: 18/579,769

(22) PCT Filed: Jul. 18, 2022
(86) PCT No.: PCT/US2022/073852

§ 371 Date: Jan. 16, 2024

Related U.S. Application Data
(60) Provisional application No. 63/222,551, filed on Jul. 16, 2021.

(51) Int. Cl. C12Q 1/18; C12N 7/00

(52) U.S. Cl. CPC C12Q 1/18; C12N 7/00; C12N 2795/00032

(57) ABSTRACT

Compositions and methods of improving an immunological response in a human subject suffering from a Pseudomonas aeruginosa in a wound comprising the step of:
(i) administering one or more isolated and purified strains of Pseudomonas aeruginosa and one or more pharmaceutically acceptable carriers or adjuvants to the wounded area of the human subject, said genomic phages interacting with innate and adaptive immune system of the human subject, while providing biological protection and/or wound recovery or stimulation; and
(ii) co-administering one or more additional genomic phages selected from genomic phages selected from Myoviridae, Podoviridae and Siphoviridae interacts and one or more pharmaceutically acceptable carriers or adjuvants to the wounded area of the human subject.

### STATEMENT AS TO RIGHTS OR INVENTIONS MADE UNDER FEDERALLY SPONSORED RESEARCH AND DEVELOPMENT

[0001] The invention was made with government support from the Bacterial Diseases Branch, Walter Reed Army Institute of Research (WRAIR). The United States Government has certain rights in the invention.

### SEQUENCE LISTING STATEMENT

[0002] The Sequence Listing, entitled ‘APT-28-PCT-WRAIR-21-06_SequenceListing_Jul. 18, 2022_Final.xml’ created on Jul. 18, 2022, and having a file size of 2,021,597 bytes is hereby incorporated by reference in its entirety.

### FIELD OF THE INVENTION

[0003] The invention relates to biologics to treat bacterial infections, such as multiple drug-resistant bacterial infections. The biologics comprise isolated and lytic bacteriophages and corresponding cocktails of isolated and lytic bacteriophages for treating ESKAPE pathogens.

### BACKGROUND

[0004] The quest to combat bacterial infections involving ESKAPE pathogens (Enterococcus spp., Staphylococcus aureus, Klebsiella pneumoniae, Acinetobacter baumannii, Pseudomonas aeruginosa, and Enterobacter spp.) impose therapeutic challenges due to the emergence of antimicrobial drug resistance. Recently, investigations with bacteriophages have led to the development of new approaches to treat ESKAPE infections. U.S. Pat. No. 10,676,721 discloses engineered bacteriophages expressing antimicrobial peptides or lytic enzymes or fragments thereof for targeting a broad spectrum of bacterial hosts, and for the long-term suppression of bacterial phage resistance for reducing bacterial infections. Bacteriophages have been demonstrated to be instrumental in the dissemination of virulence markers in ESKAPE pathogens. Significant challenges remain, however, for employing bacteriophage in treating ESKAPE pathogens and a knowledge gap exists in bacteriophage mediated antibiotic resistance and pathogenicity in ESKAPE infections. A bacteriophage infection can kill the host bacteria but in survivors can transfer genes which contribute towards survival of the pathogens in the host and resistance towards multiple antimicrobials. The knowledge on the dual role of bacteriophages in the treatment and pathogenicity will assist in the prediction and development of novel therapeutics targeting antimicrobial resistant ESKAPE pathogens. Inventors disclose herein the genome sequences of 10 Pseudomonas aeruginosa phages studied for their potential for formulation of a therapeutic cocktail; they represent the families Myoviridae, Podoviridae, and Siphoviridae. Genome sizes ranged from 43,299 to 88,728 nucleotides, with G_C contents of 52.1% to 62.2%. The genomes contained 68 to 168 coding sequences.

[0005] There still remains an unmet need to provide efficacious synthetic bacteriophages, bacteriophage cocktails and bacteriophages in combination with antibiotics are needed to develop effective therapeutics against ESKAPE infections.

### SUMMARY

[0006] This summary is provided to introduce a selection of concepts in a simplified form that are further described below in the Detailed Description. This Summary is not intended to identify key or essential features of the claimed subject matter, nor is it intended to be used to limit the scope of the claimed subject matter. Other features, details, utilities, and advantages of the claimed subject matter will be apparent from the following written Detailed Description including those aspects illustrated in any accompanying drawings and defined in the appended claims.

[0007] Specifically, a composition comprising (a) at least one phage selected from EPa8, EPa9, EPa15, EPa82, EPa83, or EPa87. In further embodiments, the composition comprises at least 2, 3, 4, 5, or 6 phages selected from EPa8, EPa9, EPa15, EPa82, EPa83, or EPa87.

[0008] In other preferred embodiments, the composition further comprises (a) at least one phage selected from EPa1, EPa2, EPa4, EPa5, EPa6, EPa7, EPa10, EPa11, EPa12, EPa13, EPa14, EPa16, EPa17, EPa18, EPa20, EPa21, EPa22, EPa24, EPa25, EPa26, EPa33, EPa38, EPa39, EPa40, EPa41, or EPa43.

[0009] In specific preferred embodiments, the composition comprises:
[0010] (a) EPa15 and any one of the phage selected from EPa1, EPa2, EPa4, EPa5, EPa6, EPa7, EPa10, EPa11, EPa12, EPa13, EPa14, EPa16, EPa17, EPa18, EPa20, EPa21, EPa22, EPa24, EPa25, EPa26, EPa33, EPa38, EPa39, EPa40, EPa41, or EPa43;
[0011] (b) EPa8 and any one of the phage selected from EPa1, EPa2, EPa4, EPa5, EPa6, EPa7, EPa10, EPa11, EPa12, EPa13, EPa14, EPa16, EPa17, EPa18, EPa20, EPa21, EPa22, EPa24, EPa25, EPa26, EPa33, EPa38, EPa39, EPa40, EPa41, or EPa43;
[0012] (c) EPa9 and any one of the phage selected from EPa1, EPa2, EPa4, EPa5, EPa6, EPa7, EPa10, EPa11, EPa12, EPa13, EPa14, EPa16, EPa17, EPa18, EPa20, EPa21, EPa22, EPa24, EPa25, EPa26, EPa33, EPa38, EPa39, EPa40, EPa41, or EPa43;
[0013] (d) EPa82 and any one of the phage selected from EPa1, EPa2, EPa4, EPa5, EPa6, EPa7, EPa10, EPa11, EPa12, EPa13, EPa14, EPa16, EPa17, EPa18, EPa20, EPa21, EPa22, EPa24, EPa25, EPa26, EPa33, EPa38, EPa39, EPa40, EPa41, or EPa43;
[0014] (e) Epa83 and any one of the phage selected from EPa1, EPa2, EPa4, EPa5, EPa6, EPa7, EPa10, EPa11, EPa12, EPa13, EPa14, EPa16, EPa17, EPa18, EPa20, EPa21, EPa22, EPa24, EPa25, EPa26, EPa33, EPa38, EPa39, EPa40, EPa41, or EPa43;
[0015] (f) EPa87 and any one of the phage selected from EPa1, EPa2, EPa4, EPa5, EPa6, EPa7, EPa10, EPa11, EPa12, EPa13, EPa14, EPa16, EPa17, EPa18, EPa20, EPa21, EPa22, EPa24, EPa25, EPa26, EPa33, EPa38, EPa39, EPa40, EPa41, or EPa43;
[0016] (g) EPa11 and EPa82;
[0017] (h) EPa11 and EPa83;
[0018] (i) EPa11 and EPa87;
[0019] (j) EPa82 and EPa83;
[0020] (k) EPa82 and EPa87;
[0021] (l) EPa83 and EPa87;
[0022] (m) EPa11, EPa39, EPa15, Epa83, and EPa87;
[0023] (n) EPa11, EPa39, EPa15, and Epa83;
[0024] (o) EPa11, EPa39, EPa15, and EPa87;
[0025] (p) EPa11, EPa15, EPa16, EPa18, EPa22, and EPa43;
[0026] (q) EPa11, EPa82, EPa83, and EPa87;
[0027] (r) EPa11, EPa39, EPa83 and EPa87; or
[0028] (s) EPa11, EPa15, EPa16, EPa18, EPa22 and EPa43.

[0029] In other preferred embodiments, the composition provides a dose of each phage in the range of 10⁵ to 10¹³ pfu, preferably, wherein said dose of each phage in the composition is in the range of 10⁶ to 10¹² pfu; 10⁷ to 10¹¹ pfu; 10⁸ to 10¹¹ pfu; 10⁹ to 10¹¹ pfu; 10⁹ to 10¹⁰ pfu; or even more preferably wherein said dose of each phage in the composition is approximately 10⁶ pfu, 10⁷ pfu, 10⁸ pfu, 10⁹ pfu, 10¹⁰ pfu, 10¹¹ pfu, 10¹² pfu, or 10¹³ pfu.

[0030] In preferred embodiments, composition causes lysis as measured by a change in:
[0031] (a) growth inhibition; (b) optical density; (c) metabolic output; (d) photometry (e.g., fluorescence, absorption, and transmission assays); and/or (e) plaque formation. Furthermore, phage-phage synergy, phage-antibiotic synergy and/or biofilm activity is capable of being measured in an lysis assay.

[0032] Additionally, in preferred embodiments, the change in photometry is measured using an additive that causes and/or enhances the photometric signal detection, preferably wherein said additive is tetrazolium dye.

[0033] In further embodiments, the composition is matched to the strains of ESKAPE bacterium known to be present in a geographic location.

[0034] In other preferred embodiments, the composition is formulated for IV injection, topical delivery, intraocular delivery, intranasal delivery, nebulization, intra-articular injection, oral delivery, intradermal delivery, or for IM injection.

[0035] As also described herein, a method of treating an infection caused by one or more bacterium, wherein said method comprises administering to a subject a therapeutically effective amount of the composition as described herein, wherein said composition is effective in treating and/or reducing said infection.

[0036] In preferred embodiments, the bacterium is multi-drug resistant; clinically refractory to antimicrobial treatment; clinically refractory to antimicrobial treatment due to biofilm production; and/or clinically refractory due to the subject's inability to tolerate antimicrobials due to adverse reactions.

[0037] In other preferred embodiments, the subject is suffering from a pathogen selected from: Pseudomonas aeruginosa; Enterococcus spp.; Staphylococcus aureus; Klebsiella pneumoniae; Acinetobacter baumannii; or Enterobacter spp.

[0038] In further preferred embodiments, the infection is selected from: a prosthetic joint infection (PJI), a chronic bacterial infection, an acute bacterial infection, a refractory infection, an infection associated with a biofilm, an infection associated with an implantable device, diabetic foot osteomyelitis (DFO), diabetic foot infection (DFI), a lung infection, such as those occurring in patients having cystic fibrosis (CF) or pneumonia, an urinary tract infection (UTI), a skin infection, such as acne or atopic dermatitis, such as conjunctivitis, bacterial kaeratitis, endophthalmitis, or blepharitis, sepsis or other blood infection.

[0039] In additional preferred embodiments, the device is permanently implanted in the subject; temporarily implanted in the subject; removable; and/or is selected from a prosthetic joint, a left-ventricular assist device (LVAD), a stent, a metal rod, an in-dwelling catheter, spinal hardware and/or instrumentation, and/or bone hardware and/or instrumentation.

[0040] As described herein the composition can be administered: by IV injection; by direct injection to the site of infection; topically; intraocularly; intranasally; by nebulization; by an intra-articular injection; by an IM injection; prophylactically; prior to a surgery; in lieu of surgery; during surgery; as a single occasion (i.e., as a “single shot”); and/or as a therapeutic course over 2, 3, 4, 5, 6, 7, 8, 9, 10, 11, 12, 13, or 14 weeks or more.

[0041] Additionally, in preferred embodiments, and as described herein is a method of treating drug resistant pathogens in a human subject presenting one or more wounds comprising the step of: administering a combination of genomic lytic bacteriophages to the human subject, wherein the drug resistant pathogens are selected from Enterococcus spp., Staphylococcus aureus, Klebsiella pneumoniae, Acinetobacter baumannii, Pseudomonas aeruginosa, and Enterobacter spp. and one or more pharmaceutically acceptable carriers or adjuvants. In a further embodiment, the one or more additional genomic phages are selected from Enterococcus spp., Staphylococcus aureus, Klebsiella pneumoniae, Acinetobacter baumannii, Pseudomonas aeruginosa, and Enterobacter spp.

[0042] A method of treating Pseudomonas aeruginosa in a human subject comprising the step of: administering a combination of genomic phages to the human subject, wherein the genomic phages represent families selected from Myoviridae, Podoviridae and Siphoviridae and one or more pharmaceutically acceptable carriers or adjuvants. In a further embodiment, the genomic phages are selected from Enterococcus spp., Staphylococcus aureus, Klebsiella pneumoniae, Acinetobacter baumannii, Pseudomonas aeruginosa, and Enterobacter spp.

[0043] A method of treating Pseudomonas aeruginosa in a human subject presenting a wound comprising the step of: administering a combination of genomic phages to the human subject, wherein the genomic phages represent families selected from Myoviridae, Podoviridae and Siphoviridae. In a further embodiment, the one or more additional genomic phages are selected from Enterococcus spp., Staphylococcus aureus, Klebsiella pneumoniae, Acinetobacter baumannii, Pseudomonas aeruginosa, and Enterobacter spp.

[0044] A method of treating wounds in a human subject suffering from a Pseudomonas aeruginosa comprising the step of: administering a combination of genomic phages to the human subject, wherein the genomic phages represent families selected from Myoviridae, Podoviridae and Siphoviridae. In a further embodiment, the one or more additional genomic phages are selected from Enterococcus spp., Staphylococcus aureus, Klebsiella pneumoniae, Acinetobacter baumannii, Pseudomonas aeruginosa, and Enterobacter spp.

[0045] A method of improving an immunological response in a human subject suffering from a Pseudomonas aeruginosa in a wound comprising the step of: administering a combination of genomic phages to the human subject, wherein the genomic phages represent families selected from Myoviridae, Podoviridae and Siphoviridae. In a further embodiment, the one or more additional genomic phages are selected from Enterococcus spp., Staphylococcus aureus, Klebsiella pneumoniae, Acinetobacter baumannii, Pseudomonas aeruginosa, and Enterobacter spp.

[0046] A method of improving an immunological response in a human subject suffering from a Pseudomonas aeruginosa in a wound comprising the step of: (i) administering one or more isolated and purified strains of Pseudomonas aeruginosa and one or more pharmaceutically acceptable carriers or adjuvants to the wounded area of the human subject, said genomic phages interacting with innate and adaptive immune system of the human subject, while providing biological protection and/or wound recovery or stimulation; and (ii) co-administering one or more additional genomic phages selected from genomic phages selected from Myoviridae, Podoviridae and Siphoviridae interacts and one or more pharmaceutically acceptable carriers or adjuvants to the wounded area of the human subject. In a further embodiment, the one or more additional genomic phages are selected from Enterococcus spp., Staphylococcus aureus, Klebsiella pneumoniae, Acinetobacter baumannii, Pseudomonas aeruginosa, and Enterobacter spp.

### BRIEF DESCRIPTION OF THE DRAWINGS

[0047] FIG. 1A shows the P. aeruginosa phage phylogenetic tree and FIG. 1B presents this same information in tabular format. Phages isolated in this work fell into the five highlighted clusters.

[0048] FIGS. 2A-2G shows the morphology of particles of P. aeruginosa bacteriophages isolated. Of the Myoviridae phages. FIG. 2A shows EPa3 (PB1-like);

[0049] FIG. 2B shows EPa7 (PB1-like); FIG. 2C shows EPa26 (PaP1-like). FIG. 2D shows a Podoviridae phage EPa4. FIG. 2E-G shows Siphoviridae phages. FIG. 2E shows EPa38 (M6-like); FIG. 2F shows EPa41 (Ab26-like); and FIG. 2G shows EPa33 (F116-like).

[0050] FIG. 3 shows the P. aeruginosa phages kill the host bacteria in biofilms (reduction by 2-7 logs.)

[0051] FIG. 4 shows the P. aeruginosa PAM2 phage cocktail efficacy in mice.

### DETAILED DESCRIPTION

[0052] The immune system has evolved to optimally respond to pathogens (see Janeway, C. A., Jr. Approaching the asymptote? Evolution and revolution in immunology. Cold Spring Harb Symp Quant Biol 54 Pt 1, 1-13, 1989; Zinkernagel, R. M., Science 271, 173-8, 1996; Germain, R. N., Nat Med 10, 1307-20, 2004). Immunization can be optimized, vaccine efficacy can be enhanced, by adopting characteristics of pathogens. For example, to enhance phagocytosis and antigen presentation, vaccines can be delivered in a particulate form with comparable dimensions to pathogens, such as emulsions, microparticles, iscoms, liposomes, virosomes and virus like particles to enhance phagocytosis and antigen presentation (O'Hagan, D. T. & Valiante, N. M. Nat Rev Drug Discov 2, 727-35, 2003). In addition, pathogen associated molecular patterns (PAMPs) stimulating the immune system as biological response modifiers, including toll-like receptors (TLR), can be used as adjuvants to activate antigen presenting cells and to enhance the immune response to vaccines (Johansen, P., et al., Clin Exp Allergy 35, 1591-1598, 2005b; O'Hagan, D. T. & Valiante, N. M. Nat Rev Drug Discov 2, 727-35, 2003; Krieg, A. M., Annu Rev Immunol 20, 709-60, 2002, each of which is incorporated herein by reference in its entirety). One key hallmark of pathogens is replication. Pathogen replication exposes the immune system to increasing amounts of antigen and immunostimulatory PAMPs over time.

[0053] In the context of limited success of antibiotics, phages are promising alternative antibacterials. Phages have demonstrated therapeutic efficacy against Pseudomonas aeruginosa infections in animals (1) and humans (1-3). Since P. aeruginosa phages have narrow host ranges (4, 5), phage cocktails are required to cover most clinical isolates (6). Inventors are developing a phage cocktail that is active against the majority of multi-drug resistant (MDR) P. aeruginosa isolates from traumatic and burn wounds. Here, we report the whole-genome sequences of 10 P. aeruginosa phages isolated from sewage (Table 1). Each phage lysed 23 to 58% of 156 diverse MDR isolates. The phages were complementary to each other (their mixes showed broader activity than single phages).

[0054] The phages were isolated from sewage collected in Washington, DC. P. aeruginosa strain PAO1 was used for enrichment. Phages were purified by three rounds of single-plaque isolation, propagated on strain PAO1 in broth, and concentrated by high-speed centrifugation as described previously (7). Host RNA and DNA were removed from lysates with RNase A and DNase, respectively, and phage DNA was isolated using proteinase K and SDS treatment followed by phenol-chloroform extraction, overnight precipitation with ethanol at 20° C., centrifugation, and resuspension in nuclease-free water (7). Phage DNA was sequenced using a Nextera XT DNA library preparation kit (Illumina, San Diego, CA). Libraries were validated and quantified using a TapeStation D5000 kit (Agilent Technologies, Inc., Santa Clara, CA) and an Invitrogen Qubit™ double-stranded DNA (dsDNA) broad-range (BR) assay kit (Thermo Fisher Scientific, Waltham, MA), respectively, purified with AMPure XP™ beads (Beckman CoulterDiagnostics, Brea, CA), and sequenced using a 600-cycle MiSeq reagent kit v3 on an Illumina MiSeq™ system, producing 300-bp paired-end reads. FastQC v0.11.5 (www.bioinformatics.babraham.ac.uk/projects/fastqc) was used for read quality control. Raw reads listed in Table 1 for each phage were subsequently trimmed using default parameters in Geneious Prime v2019.2.3 and were subjected to de novo assembly using default parameters in PATRIC (8). Phage genome annotations were carried out using the RAST server (9). Nucleic acid sequence similarity searches were performed using default parameters in BLASTn (10).

[0055] Phage genome sizes ranged from 43,299 to 88,728 nucleotides, with G_C contents of 52.1% to 62.2% (Table 1). The genomes contained 68 to 168 coding sequences. Phages EPa1 and EPa2 (family Podoviridae, genus Bruynoghevirus) were closely related to lytic phage LUZ24 (GenBank accession number AM910650.1) (11), based on BLASTn sequence comparisons. The phage genomes lacked significant nucleic acid sequence similarity to genes encoding integrases, recombinases, transposases, excisionases, and repressors of the lytic cycle. Therefore, EPa1 and EPa2 appear to be obligatorily lytic. Six Myoviridae phages, namely, EPa6, EPa11, EPa15, and EPa22 (genus Pbunavirus) and EPa17 and EPa24 (genus Nankokuvirus), also lacked genes typical of temperate phages, suggesting that they are strictly virulent, similar to other genus Pbunavirus (12) and Nankokuvirus (13) members. BLASTn and BLASTp analyses found no significant similarity in any of the eight phages to bacterial DNA and proteins, including drug resistance and pathogenicity determinants. Our data suggest that the eight phages are promising therapeutic candidates.

[0056] However, Siphoviridae phages EPa5 and EPa43, with high lytic potential, encoded putative proteins described as an integrase and a repressor in genome annotations of other phages, including Ab18, Ab19, Ab20, and Ab21, belonging to the genus Abidjanvirus (open reading frame 22 [ORF22] and ORF21 in the Ab18 genome [GenBank accession number LN610577]) (14). Subsequent inspection revealed only primase related domains and a lack of integrase-associated domains in the ORF22 product in EPa5, EPa43, and related phages. The ORF21 homolog contained an HTH_XRE domain, which is common in phages and has been associated with transcriptional antirepressor and repressor activities but remains largely uncharacterized. BLASTn and BLASTp searches for phages EPa5 and EPa43 did not identify any significant similarity to bacterial genes or proteins. Additional analysis is required to consider these two phages safe for therapeutic purposes.

[0057] In one embodiment, genomic phages useful for the invention were those selected and isolated from one or more P. aeruginosa strains. In particular, genomic phages useful for the invention were those selected and isolated from sewage collected in Washington, DC. A P. aeruginosa strain PAO1 was used for enrichment. The 10 complete phage genome sequences were deposited in GenBank and the NCBI Sequence Read Archive (SRA) under the accession numbers listed in Table 1. The composition may comprise one or more pharmaceutically acceptable carriers or adjuvants. It is contemplated that the methods of the invention can also be practiced with the addition of one or more pharmaceutically active carriers, which include adjuvants known in the art. An adjuvant is a substance or procedure which augments specific immune responses to antigens by modulating the activity of immune response in wounds, including wound cells. Exemplary adjuvants include salt based adjuvants such as alum salts, bacterial-derived adjuvants like lipopolysaccharides and bacterial toxins, adjuvant emulsions that enable the slow release of antigen, agonsitic antibodies to co-stimulatory molecules, Freunds adjuvant, muramyl dipeptides, and recombinant/synthetic adjuvants. In one embodiment, the adjuvant is a toll-like receptor (TLR) ligand, particularly a TLR-4, such as monophosphoryl lipid A (MPL), or TLR-7 ligand, such as R837. Alum is the most common salt-based adjuvant used to stimulate immune responses to protein vaccines and is the only adjuvant approved for human use in the United States (Alving, Vaccine 20(3):S56-S64 (2002); Hunter, Vaccine 20(3): 87-12 (2002)). However, alum favors Th2-biased responses and does not stimulate cell-mediated immunity. Mucosal immunity can be induced through the use of bacterial toxins such as cholera toxin (CT) and the E. coli heat labile enterotoxin (LT), however the safety' of these adjuvants is questionable (Alving, Vaccine 20(3):S56-S64 (2002); Hunter, Vaccine 20(3):S7-12 (2002)). The development of newer, safer adjuvants has recently focused on stimulating particular immune response pathways. Co-administration of cytokines, such as interferon-γ and granulocyte-macrophage colony stimulating factor (GM-CSF), has shown promise in stimulating cellular immune responses (reviewed in (Petrovsky and Aguilar, Immunol. Cell Biol. 82:488-496 (2004)). High levels of cytokines can cause toxicity however, and dosing regimens must be carefully modulated. Administration of cytokines has particular promise for DNA vaccination where genes encoding both the cytokine and antigen could be simultaneously expressed by the same vector. Additional adjuvants being explored include those that target the toll signaling pathway. CpG DMA motifs commonly found in bacterial DNA are potent activators of cellular immune responses, and newer generation DNA-based vaccines often encode multiple CpG motifs (reviewed in (Petrovsky and Aguilar, Immunol. Cell Biol. 82:488-496 (2004)).

[0058] Complete data on the P. aeruginosa phages disclosed herein are summarized in Table 2. Specifically, the GenBank and SRA Accession numbers (when available) are provided along with the SEQ ID NO: for each phage sequence. In preferred embodiments, the compositions and methods are performed with any combination of the phage, such as for example, at least one, at least two, at least three, at least four, at least five, at least six, at least seven, at least eight, at least nine, or at least ten phage selected from phage described in Table 2. The compositions can also include additional phage(s) not selected from the table below, so long as at least one of the phage listed in Table 1 are included in the composition.

TABLE 1
Genomic attributes of the 10 P. aeruginosa phages

| | | | Genome | G + C | No. of | Genome | No. of | GenBank | MTA |
|---|---|---|---|---|---|---|---|---|---|
| Phage | | | Length | Content | Protein- | Coverage | Raw | Accession | Accession |
| Name | Family | Genus | (bp) | (%) | Coding Genes | (x) | Reads | No. | No. |
| EPa1 | Podoviridae | Bruynoghevirus | 45,230 | 52.1 | 76 | 158.1 | 308,634 | MT108723 | SAMN15311669 |
| EPa2 | Podoviridae | Bruynoghevirus | 43,299 | 52.3 | 68 | 757.2 | 302,307 | MT108724 | SAMN15311670 |
| EPa5 | Siphoviridae | Abidjanvirus | 63,969 | 62.2 | 91 | 1672.2 | 534,271 | MT108725 | SAMN15311671 |
| EPa6 | Myoviridae | Pbunavirus | 66,031 | 55.1 | 95 | 70.4 | 202,626 | MT108726 | SAMN15311672 |
| EPa11 | Myoviridae | Pbunavirus | 66,800 | 55.7 | 95 | 1004.6 | 272,627 | MT108727 | SAMN15311673 |
| EPa15 | Myoviridae | Pbunavirus | 66,002 | 55.6 | 95 | 1197.8 | 479,511 | MT413450 | SAMN15311674 |
| EPa17 | Myoviridae | Nankokuvirus | 88,600 | 54.8 | 164 | 2099.6 | 671,404 | MT108728 | SAMN15311675 |
| EPa22 | Myoviridae | Pbunavirus | 65,897 | 55.4 | 98 | 1556.5 | 457,227 | MT108729 | SAMN15311676 |
| EPa24 | Myoviridae | Nankokuvirus | 88,728 | 54.8 | 168 | 4728.4 | 1,577,519 | MT108730 | SAMN15311677 |
| EPa43 | Siphoviridae | Abidjanvirus | 64,323 | 62 | 97 | 2003.0 | 398,955 | MT108731 | SAMN15311678 |

TABLE 2
Data on GenBank and SRA entries for P. aeruginosa phages

| Phage | SEQ ID | | | GenBank | Date of | SRA Accession | Date of |
|---|---|---|---|---|---|---|---|
| Name | NO: | Family | Genus | Accession No. | depositing | No. | depositing |
| EPa1 | 1 | Podoviridae | Bruynoghevirus | MT108723 | Apr. 1, 2020 | SAMN15311669 | Jun. 17, 2020 |
| EPa2 | 2 | Podoviridae | Bruynoghevirus | MT108724 | Apr. 1, 2020 | SAMN15311670 | Jun. 17, 2020 |
| EPa4 | 3 | Podoviridae | Bruynoghevirus | MT118288 | Apr. 1, 2020 | SRR13222827 | Dec. 9, 2020 |
| EPa5 | 4 | Siphoviridae | Abidjanvirus | MT108725 | Apr. 1, 2020 | SAMN15311671 | Jun. 17, 2020 |
| EPa6 | 5 | Myoviridae | Pbunavirus | MT108726 | May 10, 2020 | SAMN15311672 | Jun. 17, 2020 |
| EPa7 | 6 | Myoviridae | Pbunavirus | MT118289 | Apr. 1, 2020 | SRR13196079 | Dec. 3, 2020 |
| EPa8 | 7 | | | N/D | | | |
| EPa9 | 8 | | | N/D | | | |
| EPa10 | 9 | Myoviridae | Pbunavirus | MT118290 | Apr. 1, 2020 | SRR13196078 | Dec. 3, 2020 |
| EPa11 | 10 | Myoviridae | Pbunavirus | MT108727 | Apr. 1, 2020 | SAMN15311673 | Jun. 17, 2020 |
| EPa12 | 11 | Myoviridae | Pbunavirus | MT118291 | Apr. 1, 2020 | SRR13196070 | Dec. 3, 2020 |
| EPa13 | 12 | Myoviridae | Pbunavirus | MT118292 | Apr. 1, 2020 | SRR13196069 | Dec. 3, 2020 |
| EPa14 | 13 | Myoviridae | Pbunavirus | MT118293 | Apr. 1, 2020 | SRR13196068 | Dec. 3, 2020 |
| EPa15 | 14 | Myoviridae | Pbunavirus | MT413450 | Dec. 4, 2020 | SAMN15311674 | Jun. 17, 2020 |
| EPa16 | 15 | Myoviridae | Nankokuvirus | MT118294 | Apr. 1, 2020 | SRR13196067 | Dec. 3, 2020 |
| EPa17 | 16 | Myoviridae | Nankokuvirus | MT108728 | Apr. 1, 2020 | SAMN15311675 | Jun. 17, 2020 |
| EPa18 | 17 | Myoviridae | Nankokuvirus | MT118295 | Apr. 1, 2020 | SRR13196066 | Dec. 3, 2020 |
| EPa20 | 18 | Myoviridae | Pbunavirus | MT118297 | Apr. 1, 2020 | SRR13196064 | Dec. 3, 2020 |
| EPa21 | 19 | Myoviridae | Pbunavirus | MT118298 | Apr. 1, 2020 | SRR13196063 | Dec. 3, 2020 |
| EPa22 | 20 | Myoviridae | Pbunavirus | MT108729 | Apr. 1, 2020 | SAMN15311676 | Jun. 17, 2020 |
| EPa24 | 21 | Myoviridae | Nankokuvirus | MT108730 | Apr. 1, 2020 | SAMN15311677 | Jun. 17, 2020 |
| EPa25 | 22 | Myoviridae | Pbunavirus | MT118299 | Apr. 1, 2020 | SRR13196077 | Dec. 3, 2020 |
| EPa26 | 23 | Myoviridae | Nankokuvirus | MT118300 | Apr. 1, 2020 | SRR13196076 | Dec. 3, 2020 |
| EPa33 | 24 | Podoviridae | Hollowayvirus | MT118301 | Apr. 1, 2020 | SRR13196075 | Dec. 3, 2020 |
| EPa38 | 25 | Siphoviridae | Yuavirus | MT118302 | Apr. 1, 2020 | SRR13196074 | Dec. 3, 2020 |
| EPa39 | 26 | Myoviridae | Pbunavirus | MT118303 | Apr. 1, 2020 | SRR13196073 | Dec. 3, 2020 |
| EPa40 | 27 | Siphoviridae | Septimatrevirus | MT118304 | Apr. 1, 2020 | SRR13196072 | Dec. 3, 2020 |
| EPa41 | 28 | Siphoviridae | Septimatrevirus | MT118305 | Apr. 1, 2020 | SRR13196071 | Dec. 3, 2020 |
| EPa43 | 29 | Siphoviridae | Abidjanvirus | MT108731 | Apr. 1, 2020 | SAMN15311678 | Jun. 17, 2020 |
| EPa82 | 30 | | | N/D | | N/D | |
| EPa83 | 31 | | | N/D | | N/D | |
| EPa87 | 32 | | | N/D | | N/D | |

[0059] In one embodiment, one or more other genomic phages were used in combination with P. aeruginosa strains. For example, 30 new phages were isolated from sewage and environmental waters. Whole phage genomes were sequenced using an Illumina platform. The genome sizes varied from 32 to 89 kb, and the phages fell into five phylogenetic groups (FIG. 1): PB1-, F116-, PaP1-, Ab26-, and Mf-like. Morphology of phage particles studied using standard TEM (FIG. 2).

[0060] Thirty new different bacteriophages lytic for P. aeruginosa were isolated. Phages belong to five groups: PB1-, F116-, PaP1-. Ab26-, and M6-like, with genome sizes varying from 32 to 89 kb, within the families Myoviridae, Podoviridae and Siphoviridae. Phage lytic spectra tested on the panel of 54 strains including 51 MDR isolates from military hospitals ranged from 15% to 67%. Overall, 91% strains were susceptible to one or more phages from the panel. Seven phages demonstrated a marked lytic activity against P. aeruginosa PAO1 biofilms.

[0061] Inventors used rational design for developing P. aeruginosa durable fixed phage cocktails to include identification of phage receptors and testing their stability and activity in mixes. Five different receptors were identified for P. aeruginosa phages in different parts of LPS and type IV pilus. Five-phage cocktails PAM1 and PAM2 showed efficacy against lethal septicemic and local dorsal wound infections in mice. PAM2 is a stable defined mix of five phages with broad host range and high efficacy in preclinical studies and thus a promising therapeutic candidate.

[0062] In one embodiment, the rational design of the genomic phages is summarized in Table 3.

TABLE 3

| Steps | Methods | Quality Criteria |
|---|---|---|
| 1. Isolate phages | Single-plaque propagation (3×) | Plaque shape uniformity; plaque sizes may vary |
| 2. Propagate phages, isolate | Single-plaque propagation in 5 ml of broth; | Titers from n × 10¹⁰ to n × 10¹³ PFU/ml |
| genomic DNA | scaling up | |
| 3. Test lytic properties | Efficiency of plating; one-step growth; burst size | Clear plaques, robust lysis, limited to no secondary growth |
| 4. Characterize genomes | DNA Isolation, sequencing and analysis | Genomic purity; phage diversity; no detrimental genes |
| 5. Determine host ranges | Efficiency of plating on ≥100 strain diversity | 10-85% activity; determinable titer |
| | panel | |
| 6. Expand host ranges | Phage training; phage isolation on near- | Broader host ranges; phage activity against previously pan- |
| | neighbor species; phage engineering | phage-resistant bacteria |
| 7. Evaluate anti-biofilm activity | Live counts in biofilms; crystal violet OD | Killing effect; biofilm dispersal |
| | reduction; microscopy | |
| 8. Determine host resistance | Bacterial dilutions on phage in top agar (10⁹ | ≤10⁵ per cell per generation |
| rates | PFU/plate) | |
| 9. Identify host receptors | Mutagenesis of host genes; phage | Receptors should be different |
| | plating/adsorption | |
| 10. Assess immunogenicity | In vitro and in vivo cytokine assays; phage | Low immunogenicity and antigenicity; no/low pre- |
| | neutralization; pre-immunization impact on | Immunization impact on phage efficacy in vivo |
| | efficacy | |
| 11. Test stability | Storage at +4° C. and RT; repeated live counts | Stable at +4° C. for one year in SM buffer w/o gelatin |
| 12. Study phage interactions | Pairwise mixing; testing lytic activity/host | No impact on lysis/host range in mix vs. components; |
| | range/stability/resistance rates | expected reduction of phage resistance rates in mix |
| 13. Evaluate phage-antibiotic | Phage plaquing/lytic activity in presence of low | 100% or more increase in plaque sizes; 20% or more |
| interactions | antibiotic concentration; antibiotic MICs in the | acceleration of lysis; reduction of secondary bacterial |
| | presence of low-titer phage; combined phage- | growth; enhanced efficacy against biofilms and in animals |
| | antibiotic efficacy against biofilms and in vivo | |
| 14. Formulate cocktails | Mix 2-7 best synergistic or compatible phages | Good compatibility; 75-95% activity; anti-biofilm effect; host |
| | | resistance at ≤10⁶; stable at +4° C. for one year |
| 15. Purify phages for | CsCl gradient centrifugation, chromatography | ≤500 EU per dose for mice; ≤5 EU/kg/h for expanded access |
| animal/human use | | treatments |
| 16. Test experimentally in vivo | Wax worm model > mouse dorsal wound model > | Protection of wax worm from death; accelerated wound |
| | model target indication | healing in mice; bacterial burden reduction/wound |
| | | sterilization; protection from septicemia and death; clinical |
| | | recovery |
| 17. Use in expanded access | Testing MDR clinical isolates against phage | Pure, sterile, potent customized phage cocktail highly lytic |
| cases | panels, phage purification, sterilization, filling, | against the clinical isolate at 10⁹ PFU per dose in PBS with |
| | providing data to FDA and physician, phage | 10 mM of MgSO₄ |
| | shipping to the clinic | |
| 18. Manufacture a phage | Manufacture per cGMP requirements | Purity, sterility, reproducible potency, stability |
| cocktail in a GMP facility | | |
| 19. Test the product in Phase | Conduct human trials per FDA regulations | No adverse effects in Phase I study; significant efficacy in |
| I/II clinical trials | | Phase II study |

[0063] A panel of 83 lytic P. aeruginosa phages was isolated from sewage, environmental waters and soil. Whole genome sequencing and electron microscopy were used to classify these phages into three families and eight genera (FIG. 3), of which the representatives of five genera (marked in green) did not contain any bacterial DNA or putative determinants of transduction and thus can be safely used for human therapy.

[0064] This phage panel was active against 165/186 (89%) of diverse clinical isolates from traumatic, burn and surgical wounds, abscesses, respiratory specimens, blood, and urine. Therapeutic phage cocktails were formulated based on phage high lytic activity, anti-biofilm effect (FIG. 4) broad host range, phylogenetic diversity, safe genome content, different host receptors, stability, and compatibility in mixes (Table 4).

TABLE 4
Therapeutic phage cocktails PAM2 and PAM3

| | | | | Host | | | | Interaction | |
|---|---|---|---|---|---|---|---|---|---|
| | | | | range | Host | | Resistance | with other | Mix |
| Mix | Phage | Family | Genus | (%) | receptor | Stability | rate | phages | activity |
| PAM2 | EPa11 | Myoviridae | Pbunavirus | 51 | L-OSA, | + | 7.54 × 10⁻⁶ | − | 76.4% |
| | | | | | VL-OSA | | | | |
| | EPa17 | Myoviridae | Nankokuvirus | 30 | LPS core | + | 2.19 × 10⁻⁷ | − | |
| | EPa22 | Myoviridae | Pbunavirus | 58 | L-OSA, | + | 3.42 × 10⁻⁶ | − | |
| | | | | | VL-OSA | | | | |
| | EPa24 | Myoviridae | Nankokuvirus | 47 | A, B | + | 9.39 × 10⁻⁶ | − | |
| | | | | | bands | | | | |
| | EPa43 | Siphoviridae | Abijanvirus | 33 | LPS core | + | <8.77 × 10⁻⁹ | − | |
| PAM3 | EPa11 | Myoviridae | Pbunavirus | 51 | L-OSA, | + | 7.54 × 10⁻⁶ | − | 81.2% |
| | | | | | VL-OSA | | | | |
| | EPa16 | Myoviridae | Nankokuvirus | 35 | L-OSA, | + | 1.33 × 10⁻⁶ | − | |
| | | | | | VL-OSA | | | | |
| | EPa17 | Myoviridae | Nankokuvirus | 30 | LPS core | + | 2.19 × 10⁻⁷ | − | |
| | EPa18 | Myoviridae | Nankokuvirus | 47 | A, B, Pil | + | ? | − | |
| | EPa22 | Myoviridae | Pbunavirus | 58 | L-OSA, | + | 3.42 × 10⁻⁶ | − | |
| | | | | | VL-OSA | | | | |
| | EPa39 | Myoviridae | Pbunavirus | 46 | L-OSA, | + | ? | − | |
| | | | | | VL-OSA | | | | |
| | EPa43 | Siphoviridae | Abijanvirus | 33 | LPS core | + | <8.77 × 10⁻⁹ | − | |

[0065] Plating phages on a mucoid pulmonary isolate of P. aeruginosa, we identified several host range mutants with broad activity against cystic fibrosis isolates (EPa82, EPa83, EPa87, see Table 5). A4-phagecocktail, PAM-CF1, consisting of one wild phage and three host range mutants was unexpectedly and surprisingly active against 40/47 (85%) of cystic fibrosis isolates.

TABLE 5
Phage activity against cystic fibrosis P. aeruginosa isolates.

| Phage | Family | Genus | Activity | Phage mix | Mix activity |
|---|---|---|---|---|---|
| EPa11 | Myoviridae | Pbunavirus | 19/47 (40%) | 11 + 22 | 19/47 (40%) |
| EPa22 | Myoviridae | Pbunavirus | 17/47 (36%) | 11 + 39 | 20/47 (43%) |
| EPa39 | Myoviridae | Pbunavirus | 18/47 (38%) | 82 + 83 | 29/47 (62%) |
| EPa82 | Podoviridae | Bruynoghevirus | 28/47 (60%) | 11 + 82 | 39/47 (83%) |
| EPa83 | Podoviridae | Bruynoghevirus | 28/47 (60%) | 11 + 82 + 83 + 87 (PAM-CF1) | 40/47 (85%) |

[0066] A rational design for developing P. aeruginosa durable fixed phage cocktails was employed in accordance with the invention, including anti-biofilm effects, identification of host receptors, testing phage stability and activity in mixes, and in vivo studies Six different receptors were identified for P. aeruginosa phages in different parts of LPS and type IV pilus. Five-phage cocktails PAM1 and PAM2 showed unexpected and surprisingly better efficacy against lethal septicemic and local dorsal wound infections in mice. Additionally, PAM2 and PAM3 components showed stability, full activity and resistance reduction when used as pairwise mixes. PAM3 is a defined and stable mix of six phages with unexpected and surprisingly broad host range (84%), suggesting a promising therapeutic candidate for human use.

### REFERENCES

[0067] 1. Kortright K E, Chan B K, Koff J L, Turner P E. 2019. Phage therapy: a renewed approach to combat antibiotic-resistant bacteria. Cell Host Microbe. 252:219-232. doi.org/10.1016/j.chom.2019.01.014.
[0068] 2. El Haddad L, Harb C P, Gebara M A, Stibich M A, Chemaly R F. 2019. A systematic and critical review of bacteriophage therapy against multidrug-resistant ESKAPE organisms in humans. Clin Infect Dis 69:167-178. doi.org/10.1093/cid/ciy947.
[0069] 3. Jault P, Leclerc T, Jennes S, Pirnay J P, Que Y A, Resch G, Rousseau A F, Ravat F, Carsin H, Le Floch R, Schaal J V, Soler C, Fevre C, Arnaud I, Bretaudeau L, Gabard J. 2019. Efficacy and tolerability of a cocktail of bacteriophages to treat burn wounds infected by Pseudomonas aeruginosa (PhagoBurn): a randomised, controlled, double-blind phase 1/2 trial. Lancet Infect Dis 19:35-45. doi.org/10.1016/S1473-3099(18)30482-1.
[0070] 4. Knezevic P, Kostanjsek R, Obreht D, Petrovic O. 2009. Isolation of Pseudomonas aeruginosa specific phages with broad activity spectra. Curr Microbiol 59:173-180. doi.org/10.1007/s00284-009-9417-8.
[0071] 5. Kwiatek M. Mizak L, Parasion S, Gryko R, Olender A, Niemcewicz M. 2015. Characterization of five newly isolated bacteriophages active against Pseudomonas aeruginosa clinical strains. Folia Microbiol (Praha) 60:7-14. doi.org/10.1007/s12223-014-0333-3.
[0072] 6. Merabishvili M, Pirnay J-P, De Vos D. 2018. Guidelines to compose an ideal bacteriophage cocktail. Methods Mol Biol 1693:99-110. doi.org/10.1007/978-1-4939-7395-8_9.
[0073] 7. Sergueev K V, Filippov A A, Farlow J, Su W, Kvachadze L, Balarjishvili N, Kutateladze M, Nikolich M P. 2019. Correlation of host range expansion of therapeutic bacteriophage Sb-1 with allele state at a hypervariable repeat locus. Appl Environ Microbiol 85:e0109-19. doi.org/10.1128/AEM.01209-19.
[0074] 8. Wattam A R. Davis J J, Assaf R, Boisvert S, Brettin T, Bun C, Conrad N, Dietrich E M, Disz T, Gabbard J L, Gerdes S, Henry C S, Kenyon R W, Machi D, Mao C, Nordberg E K, Olsen G J, Murphy-Olson D E, Olson R, Overbeek R, Parrello B, Pusch G D, Shukla M, Vonstein V, Warren A, Xia F, Yoo H, Stevens R L. Improvements to PATRIC, the all-bacterial Bioinformatics Database and Analysis Resource Center. Nucleic Acids Res. 2017 Jan. 4; 45(D1):D535-D542. doi: 10.1093/nar/gkw1017 www.ncbi.nlm.nih.gov/pmc/articles/PMC5210524/9.
[0075] 9. Aziz R K, Bartels D, Best A A, et al. The RAST Server: rapid annotations using subsystems technology. BMC Genomics. 2008; 9:75. Published 2008 Feb. 8. Doi: 10.1186/1471-2164-9-75. www.ncbi.nlm.nih.gov/pmc/articles/PMC2265698/10.
[0076] 10. Altschul S F, Gish W, Miller W, Myers E W, Lipman D J. 1990. Basic local alignment search tool. Journal of Molecular Biology 215(3):403-410 DOI 10.1016/S0022-2836(05)80360-2. www.sciencedirect.com/science/article/abs/pii/S0022283605803602?via %3Dihub
[0077] 11. Ceyssens P-J, Hertveldt K, Ackermann H-W, Noben J-P, Demeke M, Volckaert G, Lavigne R. 2008. The intron-containing genome of the lytic Pseudomonas phage LUZ24 resembles the temperate phage PaP3. Virology 377:233-238. doi.org/10.1016/j.virol.2008.04.038.
[0078] 12. Lavigne R, Darius P. Summer E J, Seto D, Mahadevan P, Nilsson A S, Ackermann H W, Kropinski A M. 2009. Classification of Myoviridae bacteriophages using protein sequence similarity. BMC Microbiol 9:224. doi.org/10.1186/1471-2180-9-224.
[0079] 13. Morello E, Saussereau E, Maura D, Huerre M, Touqui L, Debarbieux L. 2011. Pulmonary bacteriophage therapy on Pseudomonas aeruginosa cystic fibrosis strains: first steps towards treatment and prevention. PLOS One 6(2):e16963. doi.org/10.1371/journal.pone. 0016963.
[0080] 14. Essoh C, Latino L, Blouin Y, Loukou G, Nguetta S M, Lathro N S, Cablanmian A, Kra A, Midoux C, Vergnaud G, Pourcel C. 2015. Investigation of a large collection of Pseudomonas aeruginosa bacteriophages collected from a single environmental source in Abidjan, Cote d'lvoire. PLOS One 10(6):e0130548. doi.org/10.1371/journal.pone.0130548.

1-17. (canceled)

18. A composition comprising at least three phages selected from EPa8, EPa9, Epa15, EPa82, EPa83, and EPa87.

19. The composition of claim 18, wherein the composition causes lysis as measured by a change in Growth inhibition, Optical density, Metabolic output, Photometry, and/or Plaque formation, wherein the phage-phage synergy, phage-antibiotic synergy and/or biofilm activity is measured in a lysis assay.

20. The composition of claim 19, wherein the change in photometry is measured using an additive that causes and/or enhances the photometric signal detection, which additive is optionally tetrazolium dye.

21. A composition comprising the phages EPa83 and EPa87, and at least one phage selected from EPa1 EPa2, EPa4, EPa5, EPa6, EPa7, EPa10, EPa11, EPa12, EPa13, EPa14, EPa16, EPa17, EPa18, EPa20, EPa21, EPa22, EPa24, EPa25, EPa26, EPa33, EPa38, EPa39, EPa40, EPa41, and EPa43.

22. The composition of claim 21, wherein the composition consists of the phages EPa83, EPa87, EPa11, and EPa39.

22. The composition of claim 22, wherein the composition causes lysis as measured by a change in Growth inhibition, Optical density, Metabolic output, Photometry, and/or Plaque formation, wherein the phage-phage synergy, phage-antibiotic synergy and/or biofilm activity is measured in a lysis assay.

23. The composition of claim 22, wherein the change in photometry is measured using an additive that causes and/or enhances the photometric signal detection, which additive is optionally tetrazolium dye.

24. A composition comprising the phage EPa15 and at least one phage selected from EPa1 EPa2, EPa4, EPa5, EPa6, EPa7, EPa10, EPa11, EPa12, EPa13, EPa14, EPa16, EPa17, EPa18, EPa20, EPa21, EPa22, EPa24, EPa25, EPa26, EPa33, EPa38, EPa39, EPa40, EPa41, and EPa43.

25. The composition of claim 24, which consists of EPa15, EPa11, EPa16, EPa18, EPa22 and EPa43.

26. The composition of claim 24, wherein the composition causes lysis as measured by a change in Growth inhibition, Optical density, Metabolic output, Photometry, and/or Plaque formation, wherein phage-phage synergy, phage-antibiotic synergy and/or biofilm activity is measured in a lysis assay.

27. The composition of claim 26, wherein the change in photometry is measured using an additive that causes and/or enhances the photometric signal detection, which additive is optionally tetrazolium dye.

The application's sequence listing, which the Patent Office published only in electronic form, follows.

SEQUENCE LISTING (32 sequences)

SEQ ID NO: 1 - DNA, 45230 bp, Bruynoghevirus EPa1
  source 1..45230: mol_type = genomic DNA; note = EPa1
gcccctaccttcgccgtatctaccaagcttcgccctctacgctaagccttcgacactaacccatcatactccccgtcgcgcttgaaccacggggtctgtcaattgattgcgctgggacaggctaccagtcgggccttctatggtacaaggccaggacctacgctctttcggagtgtgcgttattccctcagctttcgggtttctcccttgttcagtccaaggaccgtcgaaggtacactttccccaggtggccgtcacctgatgggtgcccatgttagagccgtgggcatggcttgtcaagaggcccgtctgtatttacgtggtgggccaatcctatcggctagaatcatagctttgcagttaggttataaacaaggcgccctatctgcaccgccccggaccagaacatccgctattggtgcccatgttagaggcttgggcttgccttgtcaaggctacgctaatcccctgggggagtcatgcacgttatgccgttgacgtggggcgaactataccgcttccccgatcccttgtcaacccccgatgcctgccggtcttatacttgggtgacttgggcgctcttccctggttggcagcccccggatagcacttcggcaagggggatggtggcctaggtagaacgtgggggccattagacccggttccgcggggtttgtcaagcccctggggtttcccccggtgcctgtcggtttccctcaaggcggagccattacgccatattctttacggggttgtctactggtttttcatacagtctatggactatcagtcccccagcaaacccccggatatagacagtctttgactatcacaaggtatcgatggatgtcaataggggatcaagggatattccccccgatccaccccctgaataccctaagatttttcttatgaatacccttgggtaaatccgatgaacggtatctcaaggggttgacccccggactagccttatggtatcctagggaggccctaggggctagtacccctgggagagggccaccccaacgttagcctgggggactctggggggatattccctaaatacaccggaggataaaatagacttttggggtactctcagggctataacccggatcaaaggcaccctggggactataccttgtgttatattgctgggataagaagaaatagacccagggtatagcgacaagaggaggaagacttgggatgtatctatagaacccggatcaatagaccttataaccccattaccagtaacataagaggggtagtcttagggtatacctatagaaccctatccataccgttcgtcgggtaatcaggaggaattcttaagaaatatcaaaaagtacttgacagggtattcaatttgtggtataatagatctataggcacttaagatttatcttaatttacttattacttattaaatacttaatctatagattatcttaagatagtcttaagaaccttaagaaatcacctttcccagcaaaaaataataaaaaagatgaaattaggggttgacaaaaacccaaaagtgtggtataatagtattataaggttgagaaattaaccttaagggtgcttaagatttccttgggatgtagctcagttggtagagcagatagctgttaactatccggtcgtaggttcgagccctaccatcccagccattatggcccattaactcagcggtaagagtgctcccctgtctagggagaagtctggggttcgaatccccaatgggtcgccaacaactcctcgtagctcagtttggttagagtgcctgccttggaagcaggaggtcgtaggttcgaatcctaccggggtgacattagagagataggagcgtgcgtatgtcagacgaaaaggttgtctcgattggtgccgctcctctttctgccaaagaaaaactagacctttattgcgaaggactagccgatggattaaacaaaacccaagcctatgtagccgctgggttctcccccaatcatgctcaacgcaacgttgcagcttaccatcggaaacatgccgagtacattaatgcctttatctcagagcgaatcgggagtcatgtcccaatggcgcttcgtgtgatcgtctctattgcagaagatccaaatgagaaagggggtattcgcctcaaggccgcccaggatatcctggaccgaggaggcttcggtgctaagcagaaagtggagcttaccactaagaatgtggaagatatgtccgcagaggatctgatgaatgaagttcgacgaatactcgacgaagagccaccaggatatcctggaccgaggaggcttcggtgctaagcagaaagtggagcttaccactaagaatgtggaagatatgtccgcagaggatctgatgaatgaagttcgacgaatactcgacgaagagccagacttggctaaagtcctttctttcccgaccgcttgacttcctgagtcttattaagaagcgagagggattagtgctccagtggtacaaagactccctgggatattggactgggggctacggccacctacagcgtcccggagaggacggacccattactctagcccgagcagagacttggctagagagtgatagtcaggcagcctacgatgcagcccaacggcaagtatctgagctgcctttttgcactccagaactattcgatgccctagtgagtgttaacttccagcttggtacagcatggactaagaagttcccgaagacgtggagccttctgaaagccggggagttcgacagagcagcttgggaggccgaggatagtgcctgggctaaacaaaccccagttcgcgtaagggacctccaacgagccctttggcgagcatctacgataggtagcacggtgaattaatggatacccaagagcggttgcgtaacctagtcagagagttggctgagcggcagaagtacttccgcatgaaccagtacaccccctatgggtggcaagagaagttcattgcagcctcttctacttgtgctcagctactggctatgactggcaaccgctgtggtaagacatacaccggggccttcatcatggcctgtcaccttactggtcgttaccctgagtggtggactggaagacggtttgaccatccggtgaactgctgggccgcagggatctccacagatactactcgggacattctccagtctgaactattaggcgattggaagaaccccgaggcattcggaactgggatgatccccaaagaggatatcgtaaagactgaacgtagggaaggcaaacctgggtgcgtccaagctgtaatggtaaggcacgtatccgggggtttgtcctctttgatcttcaagtcctacgaaatgtcccaagacaaattcatgggtactgctattcacgtcgtctggcttgacgaggagtgccccaaggatatttatacccagtgtgtaacccgaacggctactactgggggtattgtctatctaacctttaccccagagcatggcctcacggaaattgtgaaggacttcctccaggatcttaaacctggtcagttcctgatccatgcaagctgggaagatgccccacacctcagtccagaagttaaagagcagctactctcggtatactctccagcagaacgcaggatgagggctgagggtattcctatgctcggctctggtgtagtcttccctattctggaagagaagttcgtatgtgagccttttgatatcccggatcacttccataggatcattggtatcgacctagggtttgaccaccctaacgctatcgcctgtgtagcctgggatgcagagaaggacaagtattacctgtatgatgaacgaagtgaatccggcgaaaccctcggtatgcacgctgatgctatctacctcaagggtggtcatcagatccctgttgtagtcccccacgatgcgtttaagcatgatggagctacctcaggtcgtcgcttcgtagacctcctgaaggatgaccacaacctcaatgttgtttatgaacccttcagcaaccccccaggtcctgatggtaaacacgggggtaactctgtagagtttggtgtcaactggatgcttactcgtatggagaatggggatctcaaggtattcaatacttgtactaacttcctcaaagaaatgaagatgtaccaccgtaaggatggtaagattgtggatcgtaatgatgacatgatctcagcaactcggtatgcccttctgatggcttcccgtcacgctcgtcccggtgctgtacgaaacagtggatactacaggagtgataccgcaaggttgatccctgattggtttgggagtattgtctaaatggctaagcgtcgtaagatcaagcctatggatgatgaacaggtacttcgtcatctagaccaacttgtgaatgacgctctagacttcaactcttcggaactatccaagcagcgttctgaggccctaaagtattactttggtgagcccttcggtaatgaacgccctggtaaatccgggattgtatctagggacgtccaagagaccgtagactggattatgccttctcttatgaaggtgttcacgtcgggcggtcaagtagttaaatatgagcctgatactgccgaggatgttgagcaggcagagcaagagactgagtatgtgaactacctcttcatgcgtaagaatgaggggttcaaggtaatgttcgactggttccaagacaccctcatgatgaagactggggttgttaaggtctacgtggaagaggtactaaagcccaccttcgaacgattctcaggactctctgaggatatggtagctgacattctgtctgatccagatacctctatcctggcccaaagtgtagatgatgatggcacctacactattaagattcgtaaggataagaagaaaagggaaatcaaggtcctgtgtgttaagccagagaacttcctggtggatagactagcgacctgtatcgatgatgcccgattcctctgtcaccgtgagaagtacaccgtaagtgatctccgactcttgggggttcctgaggatgttatcgaagaacttccatacgatgagtatgagttctctgatagccaacctgagcgcctagtccgggataactttgatatgacgggtcaactccagtataactctggggatgacgctgaggctaaccgtgaggtatgggcctctgagtgctacaccctactggacgtagatggtgatggtatctctgaactccgtcgtattctctatgtaggtgattacattatcagtaatgagccttgggattgccgtccctttgccgacctgaatgcctaccgtattgcccataagttccacgggatgagtgtatacgataagatccgtgacattcaagagatccgttcggtactcatgcggaacatcatggataacatctatcgtaccaaccaaggtcgttctgtagtcttggatggtcaggttaacttggaagacttgctgaccaatgaggcggctggtattgttcgagttaagtccatgaatagcatcacacctctggagactcctcagttgtccggggaagtctatgggatgcttgaccgccttgaggcagaccggggtaagcgtactggtattactgatcgtactcgcgggctagatcagaacaccctgcactctaaccaagcggccatgagtgttaaccagttgatgactgcggctgagcagcagattgacctgattgcccggatgtttgcagagactggtgttaagcgtttgttccaacttctgcacgaccatgccattaagtatcagaatcaggaagaggtcttccagctacgaggtaagtgggttgctgttaaccctgccaactggcgagagaggtctgacctgactgttactgtaggtattggtaacatgaacaaagaccagcagatgctccacctgatgcgtatctgggaaatggcccaggctgtagtcgggggtggtggtcttggggtccttgtctctgagcagaacctttacaacatccttaaggaagtcacggagaatgctgggtacaaagacccggatcgcttctggactaaccctaactctcccgaggccctacaagccaaggcaattcgagagcagaaggaagcccaacctaagcctgaggatatcaaagctcaagcagatgcccaacgtgcccaatcggatgcgatggctaagcaagcggaggctcagatgaagcaggtagaggctcagatccgtctggctgagattgagttgaagaagcaggaggctgtcctccagcaacgagaaatggcccttaaggaagctgaactacaacttgagcgtgatcgtttcacttgggagcgagctcgtaacgaagcggagtatcaccttgaggctactcaggctagggctgcctatatcggtgacggtaaggttcctgaaactaagaagcccaccaaggcagtgaggaaataatcttgggagaacgttttggctatagtctagtgctgtctgatgcagcacagcagatggtacgtgagaacgttcttcctgagcttttccgtattgtccaagaggagattgagggcgaatggaaggctacggcccccaaagatagtgagactcgggaggcgatataccacgagctccacgcccttaaccgcgtacaacttcgtatccaggcaatcttggattcgatcactctaaaggagtataagtaatggaccttgagaatcaaggcatggatgaattcgaggcagcggaagcctttggtgagttgctcggtgatgacctcctggcccccggtgatgaaaccgtagatggtaaagtcgtaggtgaggaagaagaggaagaggttgaaaaggaaacccccgagggtgaatctgaggatgagcctgaggaagatcctgaggaagatcctgaaggtgaatccgaagaggaacctgaggctgatgctgaggatgacctctcagagaaactctttgagattccgatcggggatgatatttatgaggtcaacttcgaagagctcaagagtggttaccttcgtaatgaagagtttgtaacccgtcaggctgagttagaggaagagtatgcagctaagcttgaatcagttgatgctgaacgtgctaatctactggccgagcttgagcagtacactgttaccgctattgctggtgctaatcagtatgatagcataaactgggagcaacttaaggctcaagatccggagaagtatcagaagcttcgcctagaggctcttgaggctcgggatcaagcccaggcacttattaaacgtcgtaacgatatcaaggctatgcaggagaagcgagctgagataatccacagttcctacatcaaacgtcagacagagttggctaagaagctgatccctgaaatgactactgatgagacctggggggataagatcgtagcttacggcaaatcaattggctactccgaggatgaaatccggggtattgctgatgcccgccaactggctgtacttgatgcagcacgtaagtgggctgagtctcaggtccgtcgcaaggctgccctagagaagaaggaggagactgaactacctgctgctgttaagcctgtagctcgtagggcggaagcctcagagggttctaagcgggttaaagctgcccgtgctaatctgaggaaagaccagtcggttgaagccgctgctgctctcttctcctctctcgacattttctaatagaaggaagtacattatatggcaactccaactaatgccgtctccactgtagagatcaacggtaagcgcgaagaccttatcgatatcatctacaacatcgctccctacgacaccccgtttatgtcggctatcggcaaaggtgtagctaccgctatcacccacgaatggcagactgacgagctccgtcagccgggtaagaacacccgagtcgaaggtgaggatgcaaccatcaaggctggtagcttcaccaccatgctgaacaactactgccaaatctctgacgagaccctgcaagtcaccggtactgcggatcgcgttaagaaggctggccgtaagaacgaactggcttaccaactggctaagaagtccaaagaactgaagctggacatggaatacgccctggtcggtgcccctcaggctaaggtccagcgtaacaccactactccgggtcagatggctaacatcttcgcctactacaagaccaacggctccctgggtgccaacggtgttgccccggtaggtgacggttcgaacactggtactgctggtgatctgcggctgctgaccgaagatatgctcctgaacgcctcggagtcgatctggcgtaacggtggtcaggctaactcgatccagacttcgagctcgatcaagaaagccatcagcaagaacatgaagggtcgtgctactgagatcaccctggacgcttcggataaccgcatcgcgcagaccgtagacgtctatgagagtgacttcggtaagtacaccattcgtgctaaccgttggttccacgagaacaccctgttcgtcttcgatccgaagatgcacagcctctgctacctgcgtccgttcttccagcatgaactggctaagaccggtgacagcgagaagcgccagctcctggttgaatacaccttccgtgtaaacaacgagaagtccggtgctctgatccgcgacgtcgtagcccagctgtaatctagaggggcccttcggggccccaagttttcctataggagatcatcatgagtatccaatcgacttatgcaattgacgaagaccttgggctctttatccgaaaggatactcaagatgttgagtcaatcctgtccgctaacgccgaagagcgtcattcgggtgtaaacactaaccgtaaggataacctccggaaggttgctagtatcccgctggttgttgtagaggcactacggaatcgtccaatgtctgagggtggccccattgatcttaacctgattggttgcgaccctgaccatgccgctcgatttacccgttggcttaacgaccgagacaactatcgtatgcggacctctgaggcacgggtataataatggctacgattaataacgtaactgatctcgctattgccgcaatccagtggtctgaccgtcaggaccttacccaagaacttctgatgttgtttattggtaacactactgaccgtctcaaccgtctcctgcgggtacgtgagaacgaacactttgaaaccctgatggcctttggtggaggcatcgagatccctgagcactttgttgcccttcgatctatcacaggggatgccttgatcggtggacgtactctccagtacatcacccaagatatcttctcccactatgttaactacaactaccagccccagggtgtaacttactacactcgattggggaacttctggcgagtataccctgttgttcccgacggtgccccgttcattgtgaactactggactgttctcccagagctgagcttggctaacccaacgacttgggccctgactaagtacccgcagatttacctctatggtgtccttgagcagatttacctgtacaccatggatgaagagcggtcgatgttctggggacagaaactagaacgggcagtcatggaactccagaatgaagagaatgccgctgacttcgctagctctcgactggcgatcaaggatatcgaacgttaaggagcatccaatgcctatctttctcaaaaccctcgcaatcaatctcctggctaccctctttccaaccaaggtaatcgctaagtccatcgtgactggtgctaaagccctggctgagaagactaactccaaagttgatgacgagtttgttaaagtcctggaggacaatctaaaggagaagtcggaggatgcaactactaactgataacttgggcagcatcgtcagtgccctggtagtttcctcggtagtgacggtaggttcctcggttgtcggtcagagtgtgcatcaggctctgcttgaacgcaacatccaggccacggagaagctcacccaagcggtgagcgaactccagatttctatggcaatctttggggagcggtatgtcacccgtaaagaaatgaaagaagaattaaaggaggccaagaatgggtcttgaggtcgcaacgtatatcgatcagttggtgcctacgaaccctaccggctctgatctgaagtcctttggggatgaccatattcgcctcatcaagagtgccattaagaatactttccccaatattaaccaagctgtcaccgtaacagcagcccaattgaactcagtcgcagataccacccaatatgtgaaacctgggatggttatcatgtgggcgggtactcttgctcagatcccagcaggttggaaactttgtaatggcgtagggacaacctctaatggcatccccgtacctaacctcatcggagcattcccttggggtgttgatggtacatcccaaactgtaggtactcggggtggtaacgctaacatcgtatgggaaggtcttaccgagggccacgctcttacgctagcccaaatcccagcacacacccacacttggcgtacccgaggggctactaccctgactggttctgctggtgactccggtgctttgactggtggttctggtaacgctgccaataccaacctagagactggccctgctggtcaagggcaggcgcacacccacgctgttaagatcaacatgccactgggcaacatcccgccgttctgtgctgtattcttcattattaagaactgaggtataaaatggccctagagagacaagaggtcaagaacccaacgggtatcgtgactgatattgcacccgctgacctgcccctggataaatggtccttcgggaacaacgtccggtttaagaacggtaaggctcagaaggctctgggccattcccccatctttgatactgcccaggcccctatcttggatatgttccccttcattcggaacaacatcccatactggctcctgtgttcagaaaagaggctttacttggcagatgggactaccatcattgatgtgtccccaggtccatactctgcgagtgtaaccaaccggtggtctgtaggctccttcaacggagttatctttgctaacgatggggttaaccctcctcaccacctaccaccaaccgagagtgtgtttagggttctacctaacttcccagcgaatacaacctttagacgtcttaaatccttcaagaacttcttggttggcttgaatgtaacgtctaactctattgaaatgccccagatggtctggtggagtacctcggctgatgctggtggtgtaccggcctcttgggacccaacagaccctaccaaagatgctggacagaacaccttggctgataccaatggtgctatcgtggatggtgtgaagcttcgtgactccttcatcatctacaaagaagactctgtatactccatgcgatatattggtggtctgtacatcttccaattccagcaactgtttaatgacgtaggtatccttggtcctaactgcgctatagagtttgatggtaaccactttgttgtaggtcatggtgacgtctatgtccacaacggtgtacagaagcagtccgtgattgatgctcaggtccgtaagttcttcttctcggatatcaacccggataactaccaacggacttttgtgctagctgaccacgtgaatactgaaatgtgggtatgctattcctcgactcgatctgagcctgggaagcattgtgatagggctatcatctggaactggaaggagaacacttggagtatccgagacctccctaacgttctcagtggagcctatggcatcattgaccctaagacttctaacctctgggatgacgactccaacccctgggataccgatacgtcggtttggggtgaaggttcgtataacccagcaaagtctagcatgatcttcacgtccttccaagatgctaagctcttcctcttcggggagacttctacattctctgggcaggcattcacaagtacccttgagagatccgatatctatcttggggatgaccgaatgatgaagaccgtcagtgctgttatcccccacattacagggaacggggtatgcaacgtctgggtaggtaatgctcaggtacaagggtcgggtatccggtggaaaggtccctatccgtaccgcattgggcaggactataagattgacaccaaacatgtgggccgatacattgccttgaagtttgacttcgcctcagcaggtgactggtacttcaacggatacactttggaaatggccccgaaggcaggtatgcgatgagtcaaaggtacagcccctcgattccgccacaggaagaggaggaactgctgcccttccttaatgaggaattcgttagggttggacagactctcaatgatgtggctgatggctattggggggtttctacggagccccctaagaagcttaagccaggaacgattaagtattttgcccctggggtagtaggtcctgtatcaggtatctattattatgacttggataaccagtggaaactcgccggtactaaacccaaggatctcccaggggagtttgttctattcaccccagctaataatcatcaggccatgggcacctgtgcttaccggatgaatacagctaaggatgaagtgtggattacccttctggcatctggagggaattatactgacggtgctacggtgttggaccttccccaagcctactggcctcctgcggagctgttcatcccagcattctccagtatcattccagctcaaagccagatcacctatccaccaccctcagatccctcagcgccccctctggatcaagtctttgatgtactcaacagggctaccatccagactgctgtggtcaaccaagcgatgtttaagcttacggctaatggtcgtctgcttatccaaggaattccccaaggtgctatcttcgggggtacgtttacttatcccctagtggtgactccatgattcatttgattactcgtgagaatattgactcccttcctactgtagctcctgcattagctcgggcattcaataggactgacttgggtaagttctgggactttgagcacctggtacactccttggttaattacgaagcttttatcttctaccaagaggagagtgggtatgctggggtgttgcaagtatcccaagcccccttgggcaacatcctacacttcttctggagtggtaagatgcctgggaatgaaactccgatagactactccgaggttgatgaatacctggggcagtttgcccagaagatgggctgtcggtttatccaatgtgaaggtcgtcggggctggaagcctacccttgagaagcttgggtacaccgaggactccgtaaccttctatagagaggtaactccagatgaacttcctccaatttaatgttaaacggctgatggggttcaacgtagaggatgcccttgatagtcgggcctataaggggggtagtaagaagcaaaccactacctccacctctaccccatatcagcagggcaattacaatgaactactctcgggtgcaagctcttggctacataatgggggctttgacccgaactacggtggtgatccgaactttgatccggtggctgaccaaaatgctctccaattgggtggcatcgaagggttgggtaatctcgggggagccctccagtctctcctgggtagctcaggtgttagctctctggctgattaccttggtccttacgatcccaataaaactggcttggcgaacgccattggtgcagccaacgagcagatgcaatgggacttcgacactacggtacgcccagacctgcgtgcaggagcgaccaatgctggccagtatggcagttcccgagcgggtgtagccgaaggtattgctaccgctaggctgctccagaatcaacagaataacgcctctcagttggccttccaagaccagcaggcttacaaccagaaccgtctgaacacccttggcaacctctcggctatcgctaagggtcttggatctggtaatgccatgcaggttgacgctggttctatgctacagaatcaggagcaacaagagatcaacggtgctctccagaagtgggcctatgagaacaacgttagccttaacgacctcctcgcctacaaggaactgatctctggcgacatgggtggtactaacgtatccgtcactaaaggctctggaggcggtggcggtggtcttggttctgccctgggtgccctgggtggtgcctccttgggagccctcttcggaggcccagcaggagcttctgtgggcatgaacgctggtggtagggtagggggccttctgttctaatggcctccctaactcagaagctgttcaccattggacagaatatcggtggtgggcaggagcgggtacagttgagtcgtcaaggctcctaccgccctgtccacctggggtcaggacttagtgaggaatctagtagtggacaatcaaacccttttggcgcaatgggcggagcggcactcgcagctctcctcgggcaaggaggtgactctactccagaaacagtaccaagcttttctgtcgaaggggctaggggagcaagcgagcaaggcgcagcaaatgttgcagcaggtatgggagcgggaatgggcattcttcctagcgcagaagacctcggctttggacaactcccaaagtcaggaatcttaagtaaactctttggaggttaatcctatggccagcatggcttatgaagggtccccaattcgccctagcatccttcgggctgctcagaatgaactggatatggcgcgaatcgcaaggaacaaactgccgctggctgtagagggctcaggtattcctgatcgtgtccgtcgtgctgctcaggcagccctagagaacccagagcgttggtcccgtgcagcccaagaggttgcacctgcggctgaggctactggtcgtggtgccctgggtcgtatcgcaggtatccttggtggtcctgttggtgtaggtgttcaggctgctgtaactcctgctgatatcggtgaccaagaacgtactcgtgctgaggaaatggctcaggctgcccaggcagtagagaatatgggtcctgaggttgcccagagtgctaaccaatgggcccagggtgtaggccagagggcagctcagaaggccacaggaggcccccagggagccggtctgttgtcttatggtgttacccctaaccaaccctctatcgaacctgaaatagcccctgaggtggcctctgaggccggtgcagcggtagcagaggaagaagaggctaaccgtcaggtgatccaacagggtgctatcgaaggtctccgtagtggagccgtaagccgccctgaaatggcccaggctgtagtcgaggctgatgcccaacgggaaggtgtagagcttaaacctgaagagcttaaaactcgggttaatgaagagctcacccagatgaggactatggataatgatgacctgtctcgttatgtatcttacgctctcattggtactggtcttctggcttcggccctagacaagactggtaaggctggggatatgttcgctgcttcctatgagcgtcaacttgaccgcaacctccaggctggtatcaaccaacagaagatggctgctgctgctgctgatcgtcagattaaagagaaggatctggaacgcaaggttgctaaggataagtctgatgagcgtctggggattggtaacctagaggttaagcggggcactctggaagaaacctctcggaagaatgagggtcttctgtctaaatgggaaaaacaggctgctgtagaacgggccaagctctccctaacccagcgtggtcaagacctagctacccaacgggctcagctccaggctgaaaccgctagacgtggccaggatatgtctcaagagaatgctcagcttagttctgcggtacgtctcaagactgccaagatcagtgctgctgcacgtaaggctgctgcttcggcttcccgtggtgaggctatcactaccaaggatgccaatgagttggtcaagggtgtctctggttcggatctggtaggtggtgctaagattggtgaacaagaccagtcggctatctcccagaagcttcggaaccacctgaggcagaaccctggggctgaccccgttaccttcgtacagcaggaagcggctaagctacagaagcaaccgtcgggtctttttggctgggggtcaggtattttgagtcgtcctgcccctaagtgataaaaggtacttgacaaggtattaaaactgtggtataatagatctataggcacttaagattatcttaataacttattgtattattaattaaatctttaggttatcttaagatagtcttaaggtgcttatcttctattccagcaaaaaggtgacttatggctctttcccctgaaatgaaagccgctattgctgcggaactggctgaggtaaaagacctcgatgtagccgctgagttggcttcgttgaatgagccagaagaagtagaggtagctccccaggaagtaaccccagaggttgtacctgaagctgccccagacctgagcgctttggctgctccggctgatcctaattctatcggttctgcgatcaatcgtgggatcgacaccatgcagtctaacattggtggcactattgctactgttggtgagctgactggtagtgactacctcaaagactacggcactcagatggctgaggagaatgcccaggaggcgtcacagtacggaaccccagatgttcggtcctttgccgatatccaagatattccctccattggttctttcctaaagaataatatctcagaagccctcccctcgatgggagccgtaatggctggtggtgccgcaggtgctaaggctggatccatgtttggcgcccctggtcgtatgggtggtgccctcataggttctttcctgagctccatggggatcaacgtgggtgctctgaacaatcagatgaaggaacttgaccccgagggtagtaacccctggactgctgtcctaggtggtgctgggctctcggtactagatactgcgggtgctggtgttatcgctgccccactcctcaagcacatcggtaaagatggcgcttaccaaatgttggtccaatcgggcctacctaagcagactgccattgaggctgttactcaggctggtaagcatgcggctgtctctggtgtagccgagggtgttacctctggtgcccaacaggccctacaggacaccattgcttatgatgcagtaggacaagtacaacgcccagaagagttcatggataacctcctgacggctgcattcgctgggtctgccatgggtgtaggtgggggtgctgtatcctctggtcttaacactatggccagcaacaaggatgcagcaggctcagcccataccgatcctaacgcccctgcggctgctcctacggcttccgaaatggagcctagaggtactatcaggaaagcctgggacgccatggggaacgaagctacggcccttctagagccacttgccaaggcctcccctattgctcgtgcattctctgagaccttcagggctgacatgagtggtgagagggcctctggtaaaactattttcgaggatcaggaactccaggctggtaagtggaacactgccctggataacatcgtcgaaggcaagtccaataaggagatccgccagatcatcaatgatgcctctatgggcgtcaatacccctgaggctaccgccctccgtgatatcttgaatgatgttagggatgaggctagtggtcgagggggtatgtccgttgggaatatcgtcaactatatgccctttggactgtcccgtaagaaggtagaatcccctgagttcctagatgatattactccttattttcaagaccgtcaggctgctgaggacgctgtagctaattggctggcagagacttcggatgatacccgaggtaatactgccccagaggttacccgcctagttactcagaatcagactacgggtgcttgggaagtagatccacggtatcgtatccagggagatcctgatacccttcgggggcggttcgcccagagtgatgcagtacctaagtatggtcaactggaggaaagtcgttcctttggatctgtacctcaggagatccttaataaatacaccctcaatgaatcccctaaagacctcatccaagagatccgggattacttcgagggatcttcccaccggattgcctttaccgagaggtttggtatcaacggggagaaggccaacgctatgattgcttcggcagtagcagaggctcaacagaatggtaagcgagtaactaaggaagaagtagaccggatgtatgaccttgtggatgcctataacggtatgcacggtcgtatcaaagatccgaatatcaagaagctggctgctgtagtatccggtggattggtcttgtctaggcttccgctggctggtctttctaccctgactgagttcagtataccatttgttaaggctggtccaatgactgccctgggtgctgttcttccgacggtgggtgaagttgcccgtcaggctactcgtagtgtattcagcagcatccctaagtctgagactgggagactcatgagtgatatgaaccacacactggcctctgctacctctttgatggcagaccgggttggtgctgaggtattcaaccagtacactcagaaggctgtacgtgggatgttcttggtcaatggtctgtctatcctgacccatgttgaccgagtattcgccacagagacggccaaaagggtctaccagaacaacctcatggacctcgcctctgggcttccttttagctcagctaatggtgcccttaaggttgctcaacttagggaaatgggtgtgaacgtgagtagccaagcggatgccctcagattggtatccccagcaaccccttcggaggttctgatggccaacaacgttaagaccctagctatccgtaggttcgtagaccagacggtccttgaccccaccttcgctgacaagcctatgtggatgagtaatggtaacgtccagatgttcggacttctgaagggttatccagcagcttatggtaacattatcctcccgatgatgcgccgtaggttgtcccctcacttcactggttcttggaccaatgctgggatgggggctgcgggtgtagccttcacacttggcctgatgatgagcctgggttacatccaggatgaactccgtcagatggctaaatttggtggctctagtcgtgaggatacccggtcagaagagcaaaggatgatggatgtattgatgcaacagatgccactccaggcctctatgatctacgatatgctaacggcctaccggagaggtactacccccgcagaggttctcttgggccctgtcgcaggtgcagctaccgaaggtgctctggctgctggtaagactattgcatccttcaatgatgatccttccgctggtgagatttggaagttcttgtataagcaaactccggcccgtcctttcgttgcaggtatggaagcaatggaagacgctctggatctataaggagaagtatatggcaacttacgttgaaactgaagcagccggcccaggtggccgagcctacgtcgtggacgtaccccaggtattccgtcgtaacaaagatggggatctcattgagattaccgcagatgctggacgagtgaataccaatattgtgactgctacagagttcctcccggactattacgcggttaaagagaacgcagccctggttgtagagaacgtaactgcctcttacccagaccatccctcggaagcggtagtccccagcgtcctcgtaaacaccctcatcggtgcccctggggaaacctctggtggtaacgtggacccaggtcacgtcattggactgttctccgagactatggttgaggctccctgcggtactgccttcggtagtgagttccgggtagaccctcgtcggttccacctgggtacttacgtggctattaagcacgtgattggcccggatgaccagaacggtggtactgtaggtgattacatcatcgagcagtttgatgacatgcgaggccctgttcagaatattggttctctccagcagaactaccttgacccacgccttgtgactacccacctgggtggtaacgtggtcaacactgcacaactgaatggtaacatcactcttacccgtcagaactctggtcagcacttcatgagtatgtcggctacggatatcaccgtgaccttgggccctgacgtaaccccaggttgtgtcttccactttgtgcaaggtgctgctggtaagatcaagtttgctgtctctccagacaaggcttggtattccaaaggtaaccagacggagactgatgctcagttcggtgaatgcaccgttcgggtatacccattcggtggtactgttgggtccttcaagagtggtctctaatggacccaatgtctattcttattcgggaagtgaggtaatctaatggcaacttatattgcagatgaaaacggtgaaagcgtattcgtaattcagtctaaagctatcgccgttcgaaatgaagacggtactctccgtcatgtgatcggtcccaaggatctgaaacctgttcagtgggacgaggtggaggggaagccggagcttctggaggtagggtccaaggccaatgaggctaagcctgggaattggaaaccgaaggcttccgaagttgtaggtctggatgcggtagtcaaagctgctatcgaagaccgtatcaaggagatccccgtagcttcctatcaggatagccacgaggcccttgtggataagtttaacacccttctgaacgcccttcggggctaatcgaaaggccccttgggatttacccttggggcctttttttatacctctacggggtgatacttgactacactctcactcttggtatcagcgaagtcccggatgaagcacatggcgtcctggagtgtttcgaagataaccgggagggtaatgtcactgagtgaggggcggaaggggtccttatgttcactctcaaagtttctccataggaacgcctttttatactgagggaagaagtactttccaacttgctttacacggtatttcataaacttcccacccatgacaatatctcgaagaatagacttaagagttctcccatcgtcaggagtaacatcagtcaactgtatcccacatagaccagaatagcaaataggatcgatacgaatatgtatgtccacgggaaaccacctttaaccttttgatcgttcttcataacccctccaatctccatagaatacagaggatcgttggtccaccagatccagcatagcctccagcatttccaaccgctctttagcctccagagctgccttcttgaaggtcgctagctttgcctcagacttagccagttgaccctccatttctgtcagaagatcctctagttcagctttcgtcatagtacaccaccttatcgctagtcctgagtacatactcagagtcaatggtccaactcatggttgggcatttgatccggatcatcttgggggtaaacccatcgactactccaatggctagatgggaggaagtattccgatgaactagatatacaaccttgtcccccaccttaagctctcgtcctacacgatctctcatggttaccccttgatatccgggaggtggatgctgggaatgtacaggacctctaggacctcgatggagtacatccctcgggccttaccctcagcagcaccccctctcccaaacttcatatctagccacaactcggcggagagaggcgtcttaaacgccaatccccgttgaccgaagtcatggtccgacttgatgtagtaaatgtcaggtaggaacttactcacaggaactcacctacagacattaacttgaggtcatactcaccacccttgtgattacgcaggagggctacacctcgccagtgatcgttaccctggggccctttgtaggactcatcgtgggtgtagaagctaccgactaccagcccgtggatgcgctccttacctactgcctcgatatggtacttgaacccctgttcgtgtccttggacaaagctccgcttgatcttattaaggcgatgctcggcggaaccaccgtaaggccgaccggagttggggttatagaagtagtgggagaaggcaacaccttcgatgacacccacgtcgaggaaatcatggacaatccaatcggacagatcaaaatgatcgtacccaataaaaccttggagagcagggttagagttttcataccgcttgatacgctcctcgtggttaccgatgaagaagtgcatttctggtcggtagactctcttcttacaactcgcttggtgacgctgtaggcggcgaagaggattgagcagcaggcgcatcgcatcattacccgcttggatatcgctgaggactcgacgtccttcgatcttggcggtaccacggtcgtagcttgacagactgggcatgtcccaatggtccccaatatgcacaattcgcttggggcgattacgtgcgatccattccccgagattcccgaggtggtcaacattgacccctgggcggacttgggtatccgcaatgacgagggtatcttcattatagcgcttactcattatggaaggactccttgaaagtctctagagtgaaccagcggaagccatttcgttcggcccactccgccatagtctgctttgtaccatccttacgcttcttaagccaatggcacgctgtatcgggcttctcgaagatgaacacaagttctgtatctggggggagactctccctcacccagacatacttggccgcctcagacgcctcttggaagtaccccttgacctcgaccagcaaagtcttcgtcgatgagccagtctctaaagaggccttgaagtcggggtagtacctgtgcttcaccacgtaggttagcggcttcggcttgaactccaacgacggcatcgtctcgtgcacgagcttctcggtgttggagtcgtagggcgtcccaatcaatgacttcagcttgggccggaagaatctcccctggacgctcaatgatattctcctcttgaagtctctcgataaccttcaggacactatggctggtattgctgccaaccaaattgacccaggaaataaggttatccgagagtttgactttatggtcagggtatttctccatgacccttcggatgtgattcacaagacgatctactgctccatccgagataatattctcgtgaatagtgtgtccaagcaaggggtcagcgatgttaatgagggtaagccacttattacccttgtccctggtgtagtcaggaccgtagagtaaaccatggtcaccattccagaagctgatgctgcacaggccaatgtcgaatacacatgggtgctcctgattacacacgatgagattaaccggaaggtgtccctcggggaattcacaagactcccaaaccttaaacgaattggggtaatcgttgttaacctctttatcccctaaccgtactttcttatgaccaatggcgttgaagaagcggatgacgttaacttcaatggtatcctcatctactgcccgaggaactacacggacccgattacggatggtgacctcttggagagtacggggctctacaacatagatatcaatatccttcggcacaaccccgttgtcacaatcccggaggaacccacccccaacccgaaggccagtgaatttggtggtttcctctaggatcttgaagagttcccgacatactctaagggcctcttcaatagaatagttctccatcttcataaggtatctcccaatgtcttattactcggcaattaagctcgttaccggactgttcaatatcaaaccaattacggtctcggatgaggtagaggagacgaaagttctcagtaaggtactccttccaattatctccatagaccttttggtactcgtaggcgcaagcctggaagagatctttctcagtagtaaggtgcccaagcaaatctgccgctgacttaggcccgatttcaggacaacctggtatgttatccacagagtcaccaacaaggagttgtccatagaggaatgccgtaccgtagccctcaagcttccaggacttttggggcttcttcttcccatagagtctccaagaagcggacactcgtccaaggccctcgttacgaaagggtcccaattctggctgcttatcgccacaggcccaactgtaatggtggcactcggtgatttggcggatatccttgtcgcgagaacatgccgtaaagttatccccctcctcagttccccgaaccccgagccaatcatcagcttcgataccgttgacagtgactgctccccacttgtccttaagtcggtctgacactgtttgccagtgatgtggctttgtatttccgacgcgagtccccttatattggcggatcgtcgcaagctccaatcggaaattatcttttccagtgaggtacacttcatagtcatcagcgcctactctctctatgatttgttctatctttttatctacaagctcgttaacttcttcctcgggccagggcctaactacctcaatgtcgaagatgtgctccttcttcatagcgatgtggcctagctcgtatcgaagtacgtcaccatcaatccccgcgatcatccttagagccctccggacctttcttaagaatttcttcccaatgcttggtgagggcaaatgcttcacccttagaccgatactcgggatgttctaccacggggttggctagagcttcgtagcccttccagtcatagtactcactctcttgacgcttggctttctccatagcagcatccgtcaggctgtagcctggggtttcccccaggtctacctcaaggcctttgacagagtaattgctgggaatggtcttagccctcggatccagtagaagttccattagaaccctcctcttgttggatttccagctctagggctgctagggcattccaaacttcgtgataccggtggggtaaactactttgggggtccaaaaatttacccttgtgtcgctcaagtaggtgtcgtccgaaggcagcatcatatcgctggattccgttctcgacgaacctccaacccccgcgactatatttgcttgctccgaagttagcaacttgtgccaccgcataaagagctctcgggaacgcttcgaagatgattccaacatccaccttgcccttatcgagcttagcccccggatctcctgccttgattccattgggatccacctctaccttatcattagatgcagctacagaacttaccacccgtacaccccaaattctctcataatcagctaagcaataggggcagcccaaagggcatacccctgcctcatgatcctctaggctcttagataggagcatcttcgtcatcgaagtcctcgccaaatacgtcctcaggcttgtcctcttcctcggtgaaaccaccaccgaacagcggatcatcctcaccatcaccaccagatacaatctcgtggagacgtacaccacggagacgaagtgcagtgatagtgcctttaccccgagcacccttctgggtttcgatcaggataccgacttcgccagtagagccaccccacggattggggccatcatacggcttgttgtcactggtcaggacaatcggcttcataacagcagacttacgctcaccatcctgcatccagtcaacgtgcttcttctgcttgaccttgaacaggaattcaccgtcacgctcggtgtacttgatggtgcctttgaggcgtgcatccttggactccatcttggctaccagttcatcggcttgctccttggtcggaatgcagatagtaacttggtaaacctcaccgtactcggtatccggagttacgatgtaggggaagatcagcttcgctaccgggaaggtgaatcgttgggatactttcttagacattaaatatacctcttgtagggaagaagatattatagcacaaaaggggtcttaagtcaacccctagatgtatcagtgtgtgtcataccatgatctacctgcgatagaatcactggcaagaggacagttacaacccaagatttccccagcttccttgacacaagtctccatgaatccacggagagtctcaaggtcctcgggatggcactcccactggccttcatcgtggatatccaaaaccttccacgccttgagtccagctcgtcgtaccttctcatctaggattaccattgcccacttcatgacaatagcaccagcagcttggaggagggtgttcaatgccttgtggaccatcacctctccagactcactacggcgcatcgttagcttacgtccgtcgagtcctacaaggtagcccctttcggcttcctgcttaaccctctcaatcagcttagccagctctgggttggccttaaggaattgctccctcagcctagccccatcggccctcgtgccaccaatgatctgcccaattttggcatccccagcaccgtagatgaaggcgtagatgaacgtcttggcatcgtctcgggtaggaagacctgcggctacttggttggcagtatggacgtcaccatctacaacctctcgggtgtactctggatcgccaatgtaggaggcaagcatccgaagctctagaccagcaccatcgtagcccacgaagattaattgattcgctgggacgtatactcggtacttgcctaccgtcttccacttaccacccttgaggacctccacgatgttagtgtggggtcttaccctttcgttctcacctatgtcgcggcggaggacagtccatttccattcaccagcattaggagtcccctggaacaaccctcggatttcaggcccgaagggagaacgagcagcggggatattaactactacacggtgtctcatacggcccgtgggtgttgcacaggggttagcactcccctctaggcgtccattaggcttcacctgctcgactaatccctgaaggagggagcgtcggtgagcccaaaccattcgctgcatcacaagcttaccaagatccccctggacggtatccatggaggtctcagtcatcttcggcgtagtgagaaccttacgttgtttctcaagcttcctcttgacctcaccgattgtagtcttcccagggatgattccctggagcttcattcggagtagtccagagggggagcttcggaggtcttcgatgtagcgattcaaggcaccattcagatcggatccacgtagcttcttgccatcagtgccgactgtaatgtccttgatattccactggtcaggtatccagccttgagacagcatccagtccttgaaccttgcggttttacccaggtcaaagtccttgtactcgattgctgtaaagggtccagatacctcgaagtgacccaagcgttgccatagagcgaccaagcgtttgttcggtaggccactctttaggaatggcttactgaaggctcccgcttggacgatcatgggaggcatctgggggactgcctctaggtcaatcttgaggattcgttcgttgagtacgtggataagccacttagcccgttgagtctggaagtagaccccccgtttactctggcggctaatgatatcagctaccttatgctcaacgaacagtgactttctccagtccacttatacccccttaaaacgctccgccagattctccactactacttctacagcatcctcggagataccctccagataggagaggtaatccacagtcccgcttcgatccagcctccattgctgctccaggaaggctacagcaacctgctttagaaggtagtcgtcgatacgctccatcagtacacttttcactttactcatgtcatcaccagtcatggacgaaggtggatacacccctgcaaatagcaaggtctacaaggaagttggccaggtcaaccctacgttgctctttacggatacgctcctcactaccattgttcttcaggtagtagtggaggttgaaaagggagtcccgtaggaggttccgaggatcgaatgtttcgtgacgatcaatgtagaagtcgtcatagaggctgagatccttgaggacaacccgttgttgcttcttggcggaataccgttcgaccttaccatgaccactaatataagaatagccaaggtagtttttgggcagcttgaagaagatgctacgggcagcctggaggggtactttaggattcatcagataggcttggatgagtttcttacgaatctcctctgccttagcttgggatagggcatcatttaccagcaggttacatgcgtaatgagattccatgtgtctctcctttagagataagagcaacccccggcaccacaaggttattataccacagaaagtatcttttgtcaagcctttttgtggaaaaccttgtcgtaccagcgatagaagtattgggcgaaggtaatccccagggcaccaccccaaccgctcacgaagatgaaccatccgatatccaaatggctcgacccgactgccttgatgtaggcaaactgagcgagggtgatacaccaggagactacaaagccagctttaattttgtcatccctgagcagcttagagttcaaccccaagaggaagacctgaaagaatgcactccagaagatgacaaggacttggagggttactgacacgactcgcatacctcggggtccaacccgcaggcattacccagctcgaagtcatcagcatcgatctcgggaccaccccagccgccactgaaggctgcctctagggctgcttccttgcgggcttcatcctggggtgtaggcttgtacttattgtccatcttctttctcctctacggaagtccatccacggactgcacctacttctaggctgcggttgagcaaggggttagagtcagcctcgccttggaagaatcgaatgatctctccttcgatccgatagaagtcagcatagaacactttggtgtcctgaaactgaacattgaccacgtacttcttcatcctagatcctcaggggcccgaaggccccacctcatttactttttcttgcgaatacctttggccttacgattcccaacacgaccaccatcagcagcattagaagaatggctacggacacggaggttagaatccccgttaccgccaccatctttaacacgtttgatgtgatcgaccacctcgtcagacccgagtttccgtccaagacgcttttccaccttacggcgggctcggtgccgctgagcatctcctgacttagagccaacgcccgtttcaccgcgtcgtatagccagttctctttcacgcttgtagttcctcacacgtttagccaagaaccagtcctccactctactagctcctcccaggtcatcccgagaaccttaagcaggtagttgaagagtgccatactaacaaccccatcctgtaggcaatactcaaacatttcctcggagaacttggagaagtcgttgaagtcacccttgtgacacttcaggaatcgaccccaggctcccagcgagtgtcccataggacggtcaggccaagtcagtcgggaggcgaccaaggtatcgtaagaccgttcttctggaatcacgataccgtgaagtttctcaaggactctgttgtcgtagtcaaggatgttgtgcccgaccacgaactttgcatgggcgatgatcctgtagaatgtctccatttcctcaggccggaatccccggactacctgagttgggatatccacaaggacagcgcaccaaagccttgtgacgttatcgtaaagggcatcaccctctaggtcgtagataacgtaatcaaattggggactcgtcgtcctcaggtacttcgtcataacttccttcacgctccgtcagacaacccgtgtcggggttatacttggtgaacactagcccggtgttaccatagttccgatctttgatgactcggatacggctctcgtgcttttcttctccagaggcttgcttattcctctcgaatccaatcatcagttggcaccaacgctgcatcgcacggctaccagtgaattggctttccttcacctcagccccttcctcgtgggtacggttacccttgggtgggttaaggtgggagaagatgaatacccggatacccaactcatcagccatcccggccaactctgtggagatacgagcaatctcagtgttcatttcggagggagacaaatggttagtcatggcagtcatgttgtcaaggatgatggttttaacatccatagcaaccgcccaatagcggatgcactccttgatatgctcccaatcgttctgacccttgttcttccacatgaagagcttgccccggagctgacccgcagcattcttgaacgcctccacgtcccactcaagatcgggccggtggaaagccctttgggctaccttacccgcgatattcttgagtgtcatagcgacttgctcttccagaaggaaggttcctacgttttccccatgttcgatgatgttccatgctgcaatatggtgagccagcagagtcttaccaatgccagtaccaccacctacaccaacgatttcaccgtcgcgctgacccatagttaggttcgtcaggccttcccagggataactcttgccccacttaggtggttcaagggcttctgcaaagacctcatctacggtaacagcacagtctggggacttcaccttgcttccgaatcgaatgagctgatagacctcatctgcccgatttcgcataagcatgtcgttagcgtccttgagaggcatttcgacaaacttacagtcaggaaggagggcgcggaccctctctacggacttgcgaccttcctcatcagcatcgtgacaatagacaacctcttggaacctatcgaggatcccagactccttgaggaagccaatatctcgaccagcagagccaacaccagaagaccagctaatggacgcctgccgtaggtgcttccacttctcgggtaacttactttccatgatctgagcaatcgacatagccgaaagctcgtcctcagagataataagcttgaggtgccctacatccttgtgcatgagcgtctcaaggccgaacgggtcgacaccacccttggggctaccccgatagtaaaacgccttgggatcgaggatacggacgttatacgcacggtacttaccatcccttgtccgtgggtagtaatgttcgattacatctacgccattctccatggacaatcccacacgaaccccatagcgttctgcaatggacttactgatcttgcgggagtcaagggctttgaaggggtactcttggacctcagcgatttcccggaggatatcctcttcggacttctccgttcgcttaggcactacaaacccttcgtccagaacctcataatggccacaacggttgcacttcccgaagcggctacccttttcttcgtcgatgaacaagatgaggtgattacctgtgtgatccccacctttagctcggcaacccggacaagccgtatcaccgatgattttcttcatttaaccctccagttgactcttgaggaccagggaaggaaccgggttaacattgcccggatacgtcaggaatgggtaggagaattcacccaactgtttctccagcaggcgcaactcatcttctacggacttgagacgctcccacatgaagcgaatgccagcagactcgtcatagtacccgctgtaatccgagtcatccgtagcaggctctacagacgcactgatggagtcctgtagttgtcgctgggatgccatcaggccgatgatccgacggaggagctgacgtttcccctcatcatcggttttcatcaggttgggaatatcacggtaaatcttgtgggccttaactacatcagtatgggtcatgcagcattccttttattaacaaacttacgccagtcagcaccctcgacgatatgcaggtcttgatcttcgtcttggtgatagacaagggcggtaatcatttccccgttgatacggaaattcttggggctacgatcgtaccaacccggataaccctcaaggcgatccagattgtttaacatttcctttccttcgtctccaccggggagttcccacacttcacccgtgacaagatcctcacggtgtttgaaggacaggatggggaatcccccgcaggagtacatacggcctcgctcttgggaggtggcatgcccgacgaatcgggcgccctccagaagacagtggttgccgaagccgtgcatcagcgttccgtaaacaaaaacaaacatcagattacgccctcttcgtagatgttggtgaatgcctgggtgtaagcctccagggcgctaccgccttcgtccagacctggagcagtgttgatctccagaacgtaggcacggtcagtctcgtgcttgtagacgatatccacagcaccgaagtccagaccacagaagttgatcgcttggattgctgcgcccactgcctgagcatggccctggcgttcttcggcatcgttgacaccatagacccagccgccggctacgttgcggacgatgctttgggagtcgtctgctacaatcccctcgacgttacggcggagcttaacctgagacaggatagcccggccacgcactacgtggattcggaactcggtacgacggcctacgatgccttgggtgaacagacgagcatttaggatttcatcggggatacgatcgttgcccatgacgtataccggatactgcctgcttcggatcaactgccggatcgcctgaatctctgcatcctggacagacaccagaagggagatcccctggccgctatggccattgagttgagtacgaacgaagatacggccaccaccaatgttaaccagggcagcggcatcattgaagttgttagtccagcgagggatcagatccggtcctacagtttgcatgtggcggaagaattcatccttcttggtgaccatcgatacaacctggggattgttcaggaagattggggcaaggcgacggagacgttcagcctcttggttatgagtcccccagttgataaccatggaaccttgacggccacgataggtagaaccctcggaacgaagaattcgtccacccagggcattacgaagggctacagcaccattggatgcacggttgcctttgtagatatagatcatgatgtatctcctgtttcattgaggttagtgaagccagcaatagcccctgtaatcctaagtaagatcccatgtacacatcttaggaaccggcatgggtcggccaggggctattactaacgcactaccttactcgaagtagtactcgtggagcatatccaccgcttcggccaggacgatcggggccggcaccaggaactcttcacccggattggcctcattcagctcctgctctttcagccgacggatatccgccatcttatccagagtctcctgggagaacggatacttgcgggttgcgtcggtttccatgtggatgacaacttgtcgtttgaactgttgggtcatgtgacctccttatactgcttcggaaagtccttcacggacacatttaccacagacgaattcacactcgttgagttcgccagtgaacttgctaccttcgtataccgtgaggtcacggttccgttggtcataggctgtagggatatccccgcagacagcacaaccgcgacatacaaagtcttggaagacgtagctgttcacgaaggtatgcccttggcacttcaggggatacgagatattcgccggtggggtattgccagcctcggacttcatctgaagaactttagaaggggatatccgcgttccaatggtctgcaacggggtcccatccaccggactggccttgtgctttgggtcaagacagcttacggcaacaccttcgaccaccactttaaaatcgcggtcttcaccgatgaagtaggcgttggagatacttccacggagggtggtgtatccttcgagggcttcgacgttgagtccgtaggcttcgacgaccattccttcgtcgaggtcaattccgacgactgtaccaaagccagggtcggccttgtagggttggacttcgatgattcggaaggtgaggaggctgtgctgcttacggtagcttcctgcggctcggagattgttgttgattcgcagggtattccttgcatacgcctcatccgaagctgctcttgacgacgaagctttttggccagcttgcgttcccgcttggctgcctttgcttccttgatcgtcatagtagtccccgagatattgcttccaggcttccgctccgacgtagttgccccagaacttttctgcctgacgataactttcgggaatcggtaggtcgagaaaggttaccggagagctgatgggctctacacccttccgcacgccggcctccgtgaacgggatggataccagagtttcttcagacagctccacgatgttaccgcgaagcttgatcttgctggatgcacgctccaagaaagacttgagcatccagtcctcggatgcccatacgatagtccccgtggtggtcacagcgaagaacaggggtcgctcggagttacgaacgaagttcaggcttcgctcctttgcatcccaccaaaccagggcagcagcacccgagaatcgttcctccagggtgctacggatcccatgcttggcgatggtggctgcaaccatgtgggagtcaaccttgagggtatcactaccctccagcagatcgataccccaggcatccacggtgccgttgtgaaccattgtgatgtggtccacttggaaggggtgggcattctcatgatcccccttgtcacccatggttgcgtagcggttgtggccgatgtagatgcgggcacgattttccgtgaggaacttcttggtgtccgcatgggccaggaagtcgtaggcatctacagccatcttgtggatactgacctcgttcttgatcggatcgaccttggccaaacccgtggcatgagcaccacggacgatatcagccgccaggaggttcttgagaagagcgatttcattatcactcgcgttagttgtagaacagaagcctactaatccgcacataggtgttactccttagtaaagttcttggtgaatgtttacgccgtaggtacgggtgacgaagttggtatggtcggtcatcagcataacgaaggcgtttacaacctgggccgctaccccttcgtcagtgagatcgaatacgttgcggatggttgcattctgataacccataccacgcagagcggtcacggtcatcaaggcattacccaggttagtcaactcccctggagtccttgcgatgttgaaccgattgacaccctcctcagagaagctcaagggagttgtcgctgccgcagtgagttctgcacgacggcggttctgttcagcacgctcttgttcacggatgcgacgctggcgatcctgctcttcctccatcgggtcaacaccgttggcgatctgaatacccgtactgatagccagggcagcagccgccaggcccatttcacggccacccggagacatgttgtagtccggggagagtcccaggtggaacacgtcccgaaggtccacattggtcagcacctccagaaactcagaggtgtcaaccccttcgtgacctttggcgaaggccttgaggcagagcatacgttgcatcagcccgaccatttcatcccgagaggtcatcgcatgggaaccccggaactcgatggacccgaaggtcgtaacggtctggaggttcagagcggagtacttgggccagttcatcaggcctcgaacccgaagaccgtcttcgttgacggccaggatacgacgaccaaaggcttgagccagccaatcgttggagaagaagggaatacagaaattgctatcccggcggtagggttcacagtggtcgaagaacacatcctcgaacaccatgtaggtcaggacggtcttgatgagaacatccatcgaagagtcccgcatgtccatgtgaaggtgagtggagcaacggaaggtgggtgccggtttgacagcatccatggtagcagagaaacggtctacccgatggattgcctctgcaccactcgcggggccatcgaagacgtactccatcccactacggagagaaccatcttccttgcggttccacccatcgatccttggccattcatcggaaccctccagctcaacctcgaacccgaaggatgcgattgctgggagttcctcatgggcttgcaactcggggagatcccgcttgcgatggccaatcagagagtatagagccgacatagcagtccctcctgtttcttgaattcatctttgacaaccagttggccttccaccagatcacccaccaacatacccttccagaagactcgtttgccttcctcggtgtagaagtcccgatgggatgggctggagatcatgtctcgggattgcaggaagatccggaggacatgtaccgggtacagacttccgttgctgccaatcccgttcaggatgaagttccgggggtccagacctttcttctgagtacggttgttgacagcgaaggtgacgtaaacgttacggaagcccgtcccgtgaatgtcatagtacccgctggccggtctgtcggtcactacatcactgaagcgaacccgagagtaccggccctcgttgtcatccagggtgtaggtacgacccaggagaacgaacccatcgaaccgggtatcgtcgccatcttcctcggtgccctcgacgtacatcacatgggggacaccctccttctcgaagaagacgtaggtgtttccgtagtacatggtgaagtcgccggccagcggatgatcgttgttgaggtcattcatgagccacccccagcttctccagggccgccagagctgccactgcgtcgttctcgttgatgatacgttgcacctcgtctgcaccacctacggctgcgatggcgtcatccaggccgccttcgactaccacggagtaagccttgagggccgagtcgtatgcccacttaatcaactcatcggagaagatccagaagttggacaaggtacggtactcgacaccgtagggcttgtagcggcaggcaccggccttaccgtagagcagtttccggtcggtgtcgccgtcgatcagcaccgaggcaaggcccaggtagatatcgcaggcttggatcaccgcacggcagttagccttggtgaccggcaggtcgtcagcgaagcctatgtggatgtgaccgccagcggtacgaagggtcgggggtgcatcggtcggcatacggttacggctgcgggtccaggcgttgtagtccggctcacaaccgaagacgaatgctgcatcaccgaagccacggagaacatcttcctcgtagaggtgggaggacaggttgtcgatgacttccaggccgaaggggcgaatggtgtcgcggccgatgttcaggacgctggtgatgccgtggtggaattgctcgaaggagctggccggatgaatgttgtactccagcagaacgttatcctcctgcaacgccccaccttccaccgggatgggctcgtctttagtaccaccgacgaagccgatggcagatgcgggttcacgaccgaagcctacgaagacttccgggtcagcaccaatcagagggatatttttcatggcagttctcctatttaatcagttggttttcggtgaagaattgaatgagggtgtcctcgtaactatcgagaggcattacctcatattgctcacggttcttgtcgttgaggtcgtaagtgatacctgcggacacgctgatgatatcatcatcctcgtacccatccaggccgagttcctcgatagctcggcagtccttggtatacccctgccagagagggtccttgtggccgctgtagagacgcttgaaggtttcccgagtacgacccatgatatcttggatatcgtacagggtgggcccgtggagaagctctggggcttgtacataatcaccccagctatcaatccgccccaggcccaaagccttggccatcgtctccgtcaggtaggagtcatctacctctatgccctccttctcgcattgctcacgatactggccagcagtcacggggatcatgctgacgtagctgtcgcaatagaagttgtggccaatccttgcgcaggccacgaggactgcaaccacggggtccaacttctgaagtaggttcggctggtggctgacgtggaccagcatgtgggccatccgcagggcgttgatgatgggaccgccaggcttgtccatatctacccggacgtagaagcgactcattgcccgagggagttcgaagtccccgatgggcttgagatcaccattgccatcccaccattccttggggagatcctcggacgccgccaggatagcaccatcggtcatccggttgacgaaatcactgttgaggaagtccacagcgatccttcgggtgacctcgttggcagtgtgggaaatgaagtggacaacacaacccgcttcaccattcctgccctcgaagtccccgtagcaacgggtatgaccattgaggttcttaacttgggagaagggtcttccctcccggtcgattacttctgccgcatacattcccatgattaatctcccatgagtttcttgaggtgttgacagactgcatccagttgagggaggaaggcctcctttcgtgccccgttcatcggacgagacaggtgaggtggtatcatttcgatacgctctcctgcgtccttcgaagagggtacgtgctgaggaagcaacttgttgctctggaagaacggccagtggctgtcctcccatttccccaggtagcagggctgagggtagatggtgatctggaactccttgtccatcgtcttcctcataccctcgatcttctccttgccgaagccgtagtaggtgggagtaacccccaggatgaagtcccaggtgccatcctcctgcttcaaccaccggccataggttccttggtcttcaaccttgggcatttcccagtcgcccttgaggagtctttcgacggcctcgggcttccacaccttgccgtgggcgtttcgcagtgggtgctcggtgtacccattggccatcaggttgtagtaggacattgccacgtaggacaggaggaacccgtgcttgtcggccaactccagatgggcctcttcctcccaatcgaacgcaccagaggatacccatttgaagaggagcttgactacgggataccaaacctccggggtagtggtcctggggttcatgtagataccacacacgtagtcgttaccccacatgcggtcatcggtgaataccttctggccggggaagcggttccagggtgcgctcttggccttggaccccatgcgccagtggtggatcttggggaccttgaccttggtgttggccaccgtcaggttgacgtcagagaacatcttgttcatctggcggatgtacttgggagtacggcgggcttggatgtagaaccagccattccagttcgagaaggacttgccctccagggaaccaaagcaggagctgctggtcatcatgatgagggagttcccgtggttcattgcgtacttgagtcgagccattttgtttctccttggttgagttagccagcaatacccccagggagttcctaggggtattactaacgccctcttagaaggggccgcgacgctgctgcttacccttgtggggagcaggaaccttggtggccttgtagatgccgccattcagggtcagttcgccggaggttttcagtcgctcgtagaacactttggctttcataggctgtatccttgctggtaacgaggggagtaatgaagaccatgcacaagctgatgaagaggactaccatcaggaggtagtatacccaatcatcatcgggtggcctcttgggggatccagcgattgctgggatattatggatcgcgtcgtatatgtctgaggttacctcgctggtacggtaacaccggcggatcccttgggtgcggtccccattgctgttcgtcatagtacatcagacctccaccgtaaaggtatgacccttgggcagtaactcgaagatatattctacccgaccctcctgaatgtcccagctttggccagtctccaggcagatgaagggaatcgtctcggtgtccaggttaaagttacctgacacaaagattcgaccaccccctcggtgacgccagaagtgaggggcgacatgctggggcttactcgcctttacctcatccatggttgccccctttctccaggcgcttgctgtagttgtacaggtacttcaagaagaagagcccgtagaagatagaggccaccatcagaccggcacccagggcgctagccgaggttgaatccgaggtcatcaggtaggggaggatcaggaggtagagaacccacaaggggattgccaccagcatggtccgggtatagagcttgagcatttgatacctcacacaataagtaagatataaaggtagaccttaaggtattctataggtataagagcaacccccggcaccttaaggttattataccacacatccagcagaaagtcaataggtcaaatgttacaaacctttaaccaacttgctgatgaaatcctcgctcgggatggatccgtggtcccagtcgtagcggaccaggttctcccggcacagcttgccccaggtgtcacggacccggatgatgtggactcgcacgagggtgtcgtggttgtcgctgctggcccaagggttgctggtgctccccaggcgactgaggatacggtcggcgacccgctgctcattgttcagggagaagaccatgagggcctcaccttcgtggtactgatcggccagggcctggataacatccattgcaaacttcttggggctgaacccctcggagtccctgatcgattggtagtcagcggttcccgacgggcccatgccggtgtagattttggcggtgcagcaggaggggaagtcgtgctctctcatttgatgattcctttgataagtaggtagatggaggtgaagaatagtttccccgcgaagaggagcaggtagaccatcagcccgaaggagatcagtgggagtgacaggggccacaacccaccaataacgatggcgtgctcttccttgatccttccactatcctcgaagagggccaaggtcatgcacacacctactgctgctatgaggaagtagatgaagaggcacatcatgaggaagaaggccgccgctgcatagacgattacgctttccattagagcctcctgtagtggccgctgaagagccgcttggctgatatgaagacttccttgaggggcctgtagcaggcgaagtacaggatcatccccggcagggacaagggccagaagaaggacaggaggactgcccaatcacgatctgacccccacctcatcccacactcttccaataccgcatagatcaggcaggatgtgaacccgtagaccgccaacccgaagaagatagtggcggagatcatgaggatttcttgaacagtcatcaccaatccctcgcgcagttgcagcaacgaccctctttagggccgaaaactggcatacaatgggggcaagcctccccggattggatcatagcctccctggcgtgccgcaggtaagccgatcggctcgactccacacctacggctgccaaggtgaagccaagctcaccacggggctcctgggggtcttcctgatgggtcatgttaaaccctcgtttctctacccgacgcttcatgcggcgctcctgggccatgatttggccgatcattggtttactcttcatacggaccccacatcctggcagagatatggacctccttcaccggatagatttccccatggttgcataccatattggctgcgaagatggagaaaccaaccttggtaataaccgtcacggtcccgccttgcttgaggtatacctcatcgttcttgatgcttacatacgcgccatcctggcgtttgctgatgtgcagatcacttcgaggttgggacaccgctacggtgaagatagtacctgtcatagacacctcagtggacccgatgaaccttgtggtccaccggaatgccgagttcgtaaagggtttcggtgatgaactgtccgaagttgatgaccttcaggtggacttcaccattggggctggccaaccaatagacttggggttcagtggatttcatagacgatacctgcacgtttgccgaagatcgacacacggatatgagtaacagaccagttagggtacagcttggggttaggctggtatcgacggatgacaaccttggataccaaccagtggtagatgtattgggcgggcgtcatagtacacaccctcagtccgggaggccgaaccgatggacttcgatctctgcgtacttgacagtcactgggaagaacccgcagtcaacatcgctgctgaagaatacatcacccccaggtccgccgaagatttcgcagatgaagaattcatcattaagctccaggtactggaagactttggggttcttcttcccgtcatcctctgcgaagatgtacaggcaacccggctcaaggtcattccacatcacaaccttgatcttactggtaatcatgttgtatttgagtttcatgttacacctcctcgattgggatgaccatgaggtcgccgaacatatctttgaccctgttggacgagtccttcacggccacctcataattattaatcatggccttcgccgaagatagggtcggggttttgcaccagggagtacccccttggtagatgtagcaaacattctggtaaacaaaaaccatatgcctaccaatcactactttctttttaaaaacccccactgacccgttactacaacccttagtcacgatcaccttacaccaccttgaggacgcaggcagctaaggccccggtaggtgccataacaaacagtcccttcctctgggtcgtagagcctgtagatactcaccccgtccatcttgccaaccacttcgcccctgcttacatccacgggtgcatcttttcgaaccaccgtggtcgcaccaatcacccaaccgatagccagtcccgacaggatgatggctgcgaatgagaaaccgttcatggctacacctcgtagcaattcagctcggcagttactgggtataccagactcaccggcggcatgtaaatgacgttgccagtcttaaggttaacaacggcaacctcatcagattcacccttcatcctggtgctgcggagttcgcagaccatgtacacacccccattcatgaggaaggtttgggacttaaccagagaactgagggttattccgttgcggggccacaccttgatatccatgggctacctcacgatgcaaaagggatgctgtccaagatcgaggacaggacgaagagaaccacccacgttaccagcagcaacccattggaacgtgagcgtatggcggcacatgcaatagacttccatgtactcaccgtgcccttaccttggccagcgatgcacgcttagcccgtagccgattcagctccagggtcttgccaacgtggcttccgccagagttagtcaactcacggacagccttggcaatctttcggtcgatggcctcgatggcttgcatgttccgattcaccttgcggtagtcattgcgtttcacgggatggtttccttagttgatttcccaagacgccccagcctgcgaccataggtccggtgggggtttcggccaggaatcaccttggcctcatcagttgggattagatacccatttcctctttccaatcacgaaagaagaagtaggcgataccaatgctggatacaatgatagcgatggtcatttgcttagtttccttatgagttcctgacgctcaacaatccaccggggatcgggatgcacccggatcatcctagtgagtttcttgagacggttaatcatctgagaacgttcatgggccgcttcgtagggtgacttcatttaagccacccgcagatgttcagacggataccatccaaagtgtaaacaccgcaggcaaatttaccgtccttgaatgtccagcggtacacgataccagcgtcgaaacctacccttgcatcgcagaaaccagaaacatagtcctggccttggatggaatgaacctgcccaaagatacagtaacccacggaaacctcctgatggtctatcgctacaatgcacggacctgccatgcactctagggatagaccaggggcgcgtcatagtacacacccctggcgcacccgccgtcacgcagccttcgcttcgtccttcacttccagacgttggatcacggcgatacgctcgtccgctgcctggagctggcccttgtcgatggcacgttggatcttggccttgaaggcggcgatggcttggtccagggagaactcgtcggccacgtcacgctctttcttgtacttgaaccagggtttctcggctgcacgctccagtcgagtggccttgtccttggcgaagacgaacgggaattccttggccttttccttgtcggtattggcctcgatcttgccgttgtctacgaaccagtgtgccagggccagccggcgggagccttgcggcatcgcgttgaacagcttgcaggcaagggatacctcgccgtgctcgtcgatatgcttgaggatatccatgccggtggtttgaaccagcttgtccagggcagcaccccggttggcaatggtcttgatgatcccattgatacgcttgtagtcgctcattgtatttacctcagttgtttacttcgataatgatgacggcagagttaccgcacttgctcggcttataccagttccgaaggttagtaacctcacggttacgccagtcggtactcataagagccttgcgtttacgcgcccctgccttttcttgcaacgaagtggtcttgtcgtcgaggatcttgttacaacttgcaataatcccaaacttctgctcactacgttgttgggctttccccagattcccaaggttgtaacccaaagccttggccttgcggttggccttgcgacgcagctttttgtcaagagcctgagtcattgtcgtttcatcctttaggaatcatcagccgggacacacatcccgatacgacaaaggggtttatcggcaaaccttggcattggcgtagccggcccctttccgcgttagtgtcgtcgttatggtctgtcctcggttatcctcgggggtcttcgtatccactc

SEQ ID NO: 2 - DNA, 43299 bp, Bruynoghevirus EPa2
  source 1..43299: mol_type = genomic DNA; note = EPa2
gtccctggcttgagcttcttagggggctccatagagaccccccagtagccgtcagctaggtcattaagagtctgtccaaccctaacgaattcatcattaaggaagggcagcagttcctcctcttcctgtggtggaatcgaagggctgtacttttgactcatcgcatacctgccttcggggccatttcaatagtgtacccattgaagtaccaatccccctccgaagagaagtcgaacttcaaggctatataccggcccacatgtttagtgtcaatcttatagtcctgaccaatccggtatgggtaagggcctttccatcgaataccagaaccttgtacctgagcgttacccacccagatgttacaagtaccgttaccagtaatgtgtggaatgatggcactcactgtcttcatcattcgatcatccccgagatagatatcggatctctcaagggtactgacgaagttctgtccagagaatgtagagttattaccgaagaggaacaacttcttatcctggaaagacgagaagatcatactggactttgctgggttataagatccttcaccccagaccgaagtatcggtatcccaggggttggggtcgtcatcccagaggttagacaccttaggatcgatgatcccgtaggctccactgagaacgttgggaaggtctcggatactccaagtgttttccttccagttccagatgatagccctgtcgcagtgcttacctggctcagacctagtggaagagtagcatacccacatttcagtattcacgtggtctgcaagtacgaaggtccgttgatagttgtcagggttaatatccgagaagaagaacttacggacctgagcatcaataacagactgcttctgcacaccgttgtggacatatacgtcaccgtggcctactacaaagtggttaccatcgaactctattgcacagttgggtccgaggatacctacgtcgttaaacagctgctggaattggaagatgaacaatccaccgatataccgcatggagtatacagagtcttccttgtagatgatgaaggagtcacgaagcttcacaccatccacgatagcaccattggtatcagccaaggtgttctgaccagcatccttagtagggtccgttgggtcccaagatgcaggtacaccaccagcatcagccgaggtactccaccagaccatctgtggcatttctacagagttacttgtagcgtttaagccaaccaggaagttcttaaaagacttaagcctcttaaaagtagtattcgctgggaagttagggagtaccctaaaggttgattctgacggtggaagatgatgaggagggttaaccccatcgttagcaaagattaccccgttgaacgatcctacagaccatctgttagttatactagcagcgtaaggtcctggggatacatcgatgattgtagtcccgtcggctagatacaaccgttgttcagaacacaggagccaataggggatgttattccggatgaaaggaaacatatccaagattggggcctgggctgtatcaaagataggcgtatggcccagagccttctgagccttgccgttcttaaaccggacgttgttcccgaaggaccatttctccagtggcaggtcagcgggggcgatatcggtcacaatccccgtagggttcttgacctcttgtctctctagggccattgtatacctcagttcttaatgatgaagaacacagaacagaacggtgggatattacccaacggcatgttgatctttactgcatggttgtgagtctgaccttgaccagcagggccagtctcaaggttggtattggctgcgttaccagagccacccgtcagagcaccagagtcacccgcagaaccggtgagggtagtagcccctcgggatctccaagtgtgggtgtgcgatgggatttgggctagggtaagggcagtcccttcagtgaacccatcccatacgatgttagcgctaccacctctagtacctacagcctgggaagatccgtcgataccccaggggaatgcaccaatgaggttgggaacagggattccgttagaggtagtccctacaccattacaaagcttccaacctgctgggatctgagccagtgacccagcccacatgataaccatcccaggtttaacatactgggttgtatcagcgactgcgtttagctgggctgccgttacagtgacagcctgagaaatattggggaaggtattcttaatagcactcttaatgagtcgcaggtggtcatccccaaaggacttcagatcagagccggtagggttcgtaggcaccaactggttaatataagttgcgacctcaagacccattcttggcctcctttatctcttctttcatttcttttcgggtgacataccgctccccaaagattgccatagaaatctggagatcgctcaccgcttgggtgagcttctccgtggcctggatgtttctttcaagcagagcctgatgaacattctgaccgacaaccgaggaacctaccgtcactaccgaggatacgaccagggcactgacgatgctgcccaggttatcagttagaagttgcatcctccgtcttctccttaaggttgtcttccaggacttttacgaactcgtcgtcaaccttagagttagtcttctccgccagggccttagcaccagtcacgatggacttagcgattaccttggttgggaagagggtagccagaaggttgattgcgagggtttttagaaagataggcatctgaagctccttaacgttcaatgtctttgatcgccagtcgagtgctagcgaagtcagcggcattctcctcgttctggagttccataacagcccgttcgagtttctgaccccagaactgggaccgagcttcatccatggtgtacagataaatctgctcaaggacaccatagagataaatctgcggatacttcgtcagagcccaagtcgttgggttagcgaggcttagctctgggagtacagtccagtagttcacaatgaacggggcaccgtcaggaacaacggggaatactcgccagaagttacccaaccgagtgtagtaggttacaccctgaggttggtagttgtagttaacatagtgggtgaagatatcttgggtgatgtactgaagagtacgcccaccgataagagagtcacccgtgatagaccttagagcaacaaagtgctcagggatctcaatgccaccaccgaaggccatgagagtttcgaagtgttcgttctccctcactcgtagcaatcggttaagacggtcagtagtgttcccaatgaacaacatcagaagttcttgggtaagatcctgacggtcagaccactggatagcggcaatagcgagatcagttacgttgttgatcgtagccattcattacacccgtgcctcagaggtccgcatccgatagttatctcggtcattaagccaacgggtaaatcttgcggcatgatctgggtcacaaccaatcagattaagatcgatgggaccaccttcagccatgggacgattccgtagtgcctctacgacaaccagggggatacttgctaccttgcgcatattatccttgcggttgctattgacacccgagtggcgctcttcggcgttagcggacaggattgactcaacatcttgagtatcctttcggataaagagcccaaggtcttcgtcaattgcataagtcgattggatactcatgatgtacctcctaaggggaaacaaagggccccgaagggccccgttgggttagacctgggctacaacgtcgcggatcagagcaccggacttctcgttgtttacacgcagggtgtactcaaccagcagctggcgcttctcgctgtcaccggtcttagccagttcatgctggaagaacggacgcaggtagcagagggcgtgcatcttcggatcaaagatgaacatggtgttttcgtggaaccagcggttggcacgaatggtgtacttaccgaagtcactctcgtagacgtccacggtctgcgcgatgcggttgtccgaggcatccagggtgatttcagttgcacgacccttcatgttcttgctgatggccttcttgatcgagctcgaagtctggatcgagttagcctgaccaccgttgcgccagatagcctcagaggcattcaggagcatgtcttcggtcagaagacggaggtcaccagcggtaccagtgtcggaaccatcaccagttggcagggtaccattagcacctaccgaaccgttggtcttgtagtaggcaaagatgtttgccatctgacccggagtagtggtgttacgctggatcttagcctgaggggcaccgaccatggcgtattccatgtccagcttcagttccttcgacttcttagccagctgatacgccagttcgttcttacgaccagccttcttgaccttatctgcggtaccggtgacttgcagggtctcgtccgagatttggcagtagttgttcaacatggtggtgaagctaccagccttgatggttgcatcctcaccttcaactcgggtgttcttacccggctggcggagttcatcagtctgccactcgtgggtgatagcggtagctacgcccttgccgatagcagtcatgaacggggtgtcatagggtgcgatgttgtagatgatatcgataaggtcttcgcgcttaccgttgatctctacagtcgagacggcattagttggagttgccataagttacgtttccttctattagaaaatatcgagagaggagaagagagcagcagcggcttcaaccgactggtctttcctcagattagcgcgggcagctttaacccgcttagaaccctctgaggcttccgccctacgagcagcaggtttaactgcggcaggtagttcagtctcctccttcttctctagggcagccttgcgacggacctgagattcagcccacttacgtgctgcatcgagtacagccagttggcgggcatcagatatccctcggatctcatcctcggagtatccaatcgatttgccgtaggacacaatcttgtcaccccaagactcatccgtagtcatttccgggataagtttcttggctagctctgtctgacgcttaacgtaggcagagtggacaatctcggctcgcttctcttgcatagccttaatgtcgttacgacgtttgataagagcctgggctcggtctcgggcttccagggcttccagtcgaagggtttgatacttctctggatcctgggccttaagctgctcccagtttacattgtcatactgattagcaccagcaatagcggtaacagcgtactgctcaagctcggccagtagattagagcgttcagcatcaagctcttcgaatttagccgcatactgatcctctagttcagcctgtcgagttacaaactcttcattgcgaaggtagccactcttaagctcttcgaagttaacctcgtagacttcatccccaatcgggatctcgaagagtttatcctcaggatcttcctcggactcaacctcgggatcttcctcagaaccctcttcttcctcctcggactcaacctcttcggtgtcctctggagtaccttcgtctactacctcttcctcctcttcttcccctacgactttaccatccacggtttcatcaccgggtgccaggaggtcatcacctagcaaatctccgaaggcttccgctgcctcgaattcatccatgccttgattctcaaggtccattacttatactcctttagagtgatcgaatccaggatagcctgaatacgaagttgtacgcggttgagggcatgtagttcgtggtagatggcctccctggattctgaatccttaggtgccgtggacttccactctccctcgatctcttcttggacaatacggaaaagctcaggaagaacgttctcacgtaccatctgttgtgccgcatcagtcagcactagactatagccaaaacgttctcccaagattatttcctcactgccttagatggcttcttagtctcaggtactttaccgtctccgatataagcagcccgagcctgagtagcctcaagatgatactccgcttcgttacgagcccgttcccaagtgaaacgatcacgctcaagttgtagttccgcttccttaagggccatttctctctgctgaaggacagcctcttgcttcttcagttcgatctcggccagtcggatctgagcctctacctgcttcatctgggcctccgcttgcttagccaaggcgtccgattgggcacgttgggcatcagcttgggctttgatatcttcaggcttaggttgtgcttccttctgctctctgatggccttagcccgttgagcttcaggagaatccgggttagtccagaagcgatccgggtctttgtacccagcgttctctgtgacttccttaaggatattgtaaaggttctgctcagagactaggacccccagaccaccacccccgactacagcctgggccatttcccagatacgcatcaggtggagcatctgctggtctttgttcatgttaccaataccaacggtaaccgtcaggtcggatctttctcgccagttggcagggttaatagcaacccacttgcctcgtagctggaagacctcttcctggttctggtacttaatggcatggtcatgcagaagttggaacaaacgtttaacaccagtctctgcgaacatccgtgcaatcaggtcaatctgttgctcagccgcagtcatcaactggttcacactcatagccgcttggttagagtgtagggtattttgatctagacctcgggtacggtcagtgatacctgtccgcttacccctgtctgcctcaagtcgatccagcataccatagacttccccagacaactgaggggtctccagaggcatgatagagttcatggccttaacccgaacgatacccgctgcctcattagtcagcaagtcttcgaggttaacctgaccatccaagactacagatcgaccttggttagtccggtagatgttgtccatgatgttgcgcatgagtaccgaacggatctcttgaatgtctcggatcttatcgtagacactcatcccgtggaacttatgggcaattcgataggcattcagatcagcgaaaggacggcaatcccaaggctcgttgctgatgatatagtcgcctacatacagaatacggcgaagctcagagataccatccccatctacgtccagaagggtatagcactcagaggcccatacctcacgattagcctcggcatcatccccagagttatactggagttgacccgtcatatcgaagttgtcacgtaccaacctttctggctgactatcagagaactcatactcgtcgtatggtagctcatcgagtacatcttcgggaacacccaggagccgcaggtcacttacggtatacttctcacggtgacataggaagcgtgcatcatcaatgcaggtagccaaccgatcaaccaggaagttctcaggcttgatgcaggtgactttaatctctcgcttcttcttatccttgcgaatcttaatgctgtaggttccatcctcgtccacactctgggctagaatctcagtgtctggatcagctaggatatccgctaccatttcctcagagagaccagagaaccgttcgaaggtggggttcaggacctcttccacgtagacctttacaaccccggtcttcatcatcagagtgtcttggaaccagtcgaacattaccttgaacccctcgttcttacgcatgaagaggtagttcacatactcagtctcttgctctgcctgttcaacatcttcggcagtctgaggttcatacttaactacttgaccgcctgacgtgaataccttcataagagaaggcataatccagtctacagtctcttgaacgtccctagatacaatcgcggacttcccaggtcgctcgttaccgaagggctctccaaagtaatacttcagggcctcagaacgctgcttggaaagctccgaagagttgaaatcaagggcgtcgttaacaagttggtctagatgacgaagtacctgttcatcatccataggcttaatcttgcgacgacgcttagccattagacaatactcccaaaccaatcaggggtcaactttgcagtatcactcctgtagtatccactgtttcgtacagcaccaggacgtgcataccgggaagccatcaacagggcataccgggtagcggagatcatatcgtcgtttctgtcgataatctttccgtcctttcggtggtacattttcatttcttttaggaagttcgtacacgtattaaacaccttcagatcaccattctccatacgggtcaacatccagttaacgccgaactctacagagttacctccgtgtttaccatcaggacccggtgggttactgaagggctcatacactacattgaggttgtggtcatctttaagaaggtctacgaatctacgaccagaggttgctccatcgtgcttaaaggcatcatggggaacaactaccgggatctggtgaccacccttcaggtagatagcatcagcgtgcatcccaagggtctcaccactctcactcctctcatcatagaggtagtatttgtctttctcagggtcccaggccacacaggcgatagcgttagggtggtcaaacccaaggtcgataccgatgatcctatggaagtgatcggggatctggaaaggctcacatacaaacttctcttccagaatggggaagactacaccagatccgagcatagggacaccctcggccctcatcctgcgttctgctggagagtatacagagagtagctgctctttaacttctggactgaggtgtggggcgtcttcccagcttgcatggacaaggaactgaccaggtttaagatcctgtaggaagtccttgacgatctccgtgagaccatgctctggggtaaacgtcagatatacaatacccccagtagtagccgttcgggttacacactgggtataaatatctttggggcattcctcatcgagccagatgacgtcgatggcagtacccatgaatttgtcctgggacatttcgtaggacttgaagatgagggacgagaggcccccggaggtatgcttaacaactactgcttgcacacatccgggtttaccttccctacgaatcgtctctacgatatcttccttggggatcatccccgttccgaaagcctcagggttcttccagtctcctaggagttcggactggagaatatcccgagtggtatccgtggagatccccgccgcccagcagttaactggacgatcatattttctaccagtccaccactcagggtatcgaccggttaggtggcaggccatgataaaggccccggtgtaggttttaccacagcggttaccagtcatagccagtagctgggcgcagttcgaggaagctgcgataaacttctcttgccacccataaggagtgtactggttcatgcggaagtatttctgccgctcagccaactccctgactagattccgtagccgctcttgggtatccattagaccaccttgtcacctactgttgatgcacgccacagggcccgttggaggtcccttacgcgcactggagtttgtttagcccagaggctatcctctgcctcccatgcagcttcatcaaaccttccggatttcagaagattccacgtcttggggaacttcttcgtccacgctgtacccagctggaagttgacgctaactagggcatcgaatagctctggagtgcaaaaaggcagctgagatacttgcccttgggctgcatcataggctgccttactatcgttctctagccaagtctctgctcgggctagggtaatcggtccgtcttccccagggagttgcaagtgaccataacctccggtcattttcccaagggagtctttgtaccactttagaaccaacccctctcttcgcttgattagatcaaggtacttaagaggttgggaaagaaatgactttagccaactctggctcttcgtcgagaattcgtcgaacttcactgattagatcctctgcggacatatcttccacattcttagtagtaagctccagtttctgcttagctccgaagcctccacggtccaggatatcctgggctgccttgaggcgaatcccacctttctcttctgggttgctagcaatctctacaaccacacgaagcgccatggggacatgactcccgatgcgctcagagataaaggcgttgatgtattcggcatgctttcgatggtatgcagcaacgttgcgttgagcgtgattaggagagaacccagcggctatatacgcttgggttttattcataccatctgccagagcctcacaatagaggtctagcttttctttagcagaaagaggagcagccccaatcgagacaaccttttcgtctgacatacactgctccgatctctctaaatggtcaccccggtaggactcgaacctacgacctcctgtgtccaagacaggcactctaaccaactgagctacgaggagttaatggtggtcgaaggaaggaattgaacctctagccaatggcgtccgggttacagccggatggtagtagccatctacctctacaacgacctctgttggctgggacggcagggctcgaacctgcgacctgagagttaacagctccctgctctaccaactgagctacatcccaatgaaatcttaaggtaatttctcaaccttataatactattatatcacactttttctattttgtcaagtcttttttcttcttttttttattttagtcgcaaggcccggttttgttagggtttttgctggaatggggaaggggttcttaagactatcttaagataaccttaaggtaactaaccttcttagtaagtaagtcaaaaggaagaaggaatcttaagagcctataggtctattatactacattttcgataccttgtcaagtactttttgatatttctttgataatcacatgatttacccgacgaacggtatgatagggttctataggtataccctaagactacccttcgtaggttgctggtaaggggtaagtggcatagggttcccttgatccaggttctataggtactccctgaggttgttccataggtatacccctagactacctctgtttgctatgtcctggcctattgcccctttatccagtaatataccaacaggtatcgggggttgcctttgatccagggcctataaccgggggtaccccaaaagtctattttatcctccggtgtatctggggaatatccccccaggagtcccccagataaagtgggggtggcctatccccaggggtatagcccctagcccctccctaggataccatgagactaaccccaagatcaacccctagggataccgttcatcgggtggacccaagggtattcataagaaaaatcttagggtattcagggggtggatcggggggaatatcccgtgatcccctattgacttccattgatccccctgttaatcaaagactgtctatatccgggggtttgctgggggactgatagtccatagactgtatgaaaaaccagtagacaaccccgtaaagaatatggcgtaatggcgccgccttgagggaaaccgataggcaccgggggaaaccccaggggcttgacaaaccccgcggaaccgggtctaatggcccccacgttctacctaggccaccatcccccttgccgcagtgctatccggggggctgccaactcaggaagagcgcccaagtcacccaagtgtaaggccggcaggcatcgggggttgacaagccaagcccaaggctctaacatgggcacccatcaggtgacggccacctggggaaagtgtaccttcgacggtccttggactgaacaggggagaaacccgaaagctgagggaatagcgcatactccgattagagcgctggctttgatggtcgctgccttatgacccatccgactggttgcctgctccagcgtaaacaattagcagagtccatggtggaatcgtgatggacagtatgttgggttagtataaatggcttagcgcagagggcgaagcttggtagatactggcgaaggtagggacgagtagacacgaagactcccaaggatagccagaggacagaccataacagtgatactaacgcggaaaggggccggctacgccaatgccaaggtttgccgactaacccctttatcgtatcgggatgcgtgtcccggctgatgattccaaaaggatgaaacgatgaacgctgctatcgataagaagctgcgccgcaaggctagtcgcaaggctcgtgcccaaggtctgaacattgggcaccttggcaaagctcagcagcgggcagaacagaagttcgggatcatttctaattgtaacaaaatcctggacagtaagtatgtttcacttcaggaaaaggctggagcacgcaagcgaaaggctctgatgaataccgattggcgtaatcgcgaggatactaagctgcgcaattggtacaagcctagcaagtgcaagaactcccccgtcacccacatcaaacccgaggtataagttatgagcgactacaagcgtatcaacggcatcatcaaaaccattgccaaccggggtgctgccctggacaagctgattcaaactaccggcctggacattctcaagcacatcgacgagcatggcgaggtgtccttggcctgcaagctgttcaaagcgattccgcaaggctcccgccggctggccctggcacactggttcgtagacaacggcaagatcgcggccaataccgacaaggaaaaggccaaggaattcccgttcgtcttcgccaaggacaaggctactcgactggagcgtgcagccgagaaaccctggttcaagtacaagaaagagcgtgacgtggccgacgagttctccctcgacgcggccatcgccgccttcaaggccaaggtacagcgcgccatcgacaagggccagctccaggcagcggatgagcgtatcgctatcatccaacgactggaagtcaaggacgaagcgaaggcagcgtaacggcggatgcgcctggggtgtgtactatgacgcgccccaggtctatccctagagtgcatggtaggtccgtgcattgtagcgatagaccatcaggaggtttccgtgggttactgtatctttgggcaggtccataccatccaaggccaggattatgtttctggtttctgcgatgcaagggtaggtttcgacgctggtattgtgtaccgctggacattcaaggacggtaagtttgcttgtggtgtctacactctggacggcatccgtctgagcatctgcgggtggatcaaatgaagtcaccctacgaagcggcccatgaacgtgcccaaatgattaatcgtctcaagaaactcactaggatgatccgggtgcatcccgatccccggtggattgttgagcgccaggaactcataaggaaacttagcaaatgaccatcgctatcatcgtatccagcatcggcatcgcatacttcttcttccgtgactggaaggaagagatgggtatcaactgacccaactgatgaggccatggtgattcctggccgaaacccccaccgaacctatggttgcaggctggggcgtcttgggaaatcaacaaaggaaactatcccgtgaaacgcaacgactatcgtaaggtcagccgcaacatgcaagccatcgaggctatcgaccgcaagattgctaaggtaactcgtgagttgaccaactccagcggcaatcaccttggtaaaaccctggagttgaacaagctccgtgccaagcgggcatccttggttaagaacagggcgcggtaatggcatggaagtatattgcatgtgccgccatacgctcacgttccaatgggttgttgctggtagcgtgggtggttctcttcgtcctgtcctcgaccttggacagcaccccttttgcatcgtgaggtagttgaggtgaggaccactaaagaattcaactgctacatggcgatagccacgatgataacgctcgggtttatgacatggttagtttatagccttctcaggagctgatggcaatggatatcaaaatctggccccgcaacggcgtaaccctcaacaacctggtcaaatcccaaacattcctcatcggtggggatgtgtacatggtctgcgaactccgcagcattaagatgaagggcgaatccgacgaggttcccgttctcaatctcaagactggcaacgtcatctacatgcctccggtgagcctggtatacccagtaactgccgagctgaattgctacgaggtgtaacatgaaactccaatacaatatgctcaccagtaagatccgggttgcctcttgggatgatctggagtcgggtcgtctgtacatccgccaggacgaggacggggctgcaaacccgcgtgtctttatgtacatggaagttgcagatgaattcttcatcgtggatatcttcggtgggcccgtgggtgccgtatacttcagcggcgatgttgactgcgggttctaccccgtgaccatcaaggctgcgtccatcgaagtccatcggttcggccctccggcctagggtgtgtactatgacgcccgccctgtatctattcctctggttggaatccttggtcagcatccgcaggttccagcctaaccccaaggcgtaccctggttggtacgtgacccacatccgtgtatctatcttcggcaaacgtgtaggtatcgtctatgaaatccactgaaccacaagtctattggttggccagtcccgatggtgaattccacctgaaggtcatcaacttcggccagttcatcaccgaaaccctttacgaactcggcattccggtggaccacaaggttcatcgggtccactgaggtgacccatgacaaacactaccttcactgtagcagcgtcccgcccccggaacgaccttcacatcagtaagcgggcggatggggtttatgtgaaccctaaaaactctggcgatattgtcttcctcaaggaaggtaataaggttgtcgtcctcagccagagcgggttcagcatcctcgaagcccagaccatgcccaacatcggggagctctacccggctaaggaggtccatgtatccgccaaggtgtggggaccgtatgaagagtaaaccaatgatcggccaaatcatggcccaggagcggcgaatgaatcgtcgagtagagaaacgagggttcaacatgacccatcaggaagtcacccaggagccccgtggtgagcttggtttcaccttggctgccgtaggtatggagtcgagccgatcggcttacctgcgccacgccagggaggccatgatccaatctggtgagccttgccctcattgtatgccagtcttcggtcccaaagagggccgttgttgcaactgttcgagggactggtgatggatctcggcaacttttggtgcctattgggtgtccatcggtacaaaatacttgatggtggaccctaccatcctccgccgcatgggcagccactacaacccctgggcctccagcgccaaccactcgacgaaggttcgggttcacgtcatcaacgtgcaagctgcggcggagatcctcatcaaccacggtgtcctcatccgccgactcggtggtttgcaggacttccccggtactgtcgagcactcggaatacctcgacaagctctgtaaaggtctgtaacatctaggccttgacattctgctgaaagtgtggtataataaccttaaggtgtccggggttgctttatatccctaggatacctaaggttctaaccttctatcttcttcatcttaagaaagaggtgagaacaatggtcctcaagctctacactcgggtaatgcttctggctatccccgcatgggtaagcatcctctgggtagtaccccagatgctgtcccccgctaacaccatggttaacgccatcggtgccggcctcctggtcctttccatcctgtactccctctgggctgtcagccatctgtactcctacgccggtaagctcactggcaagaagggggtgtagtatggccactgtaacaagaagtagtaaggggccaaggatccctctttacttcgaacgtaagcgcgattctcagatctatcttcgttcggaatcctggaaggacctcaccatcccgatggtaaacatctgcaatgggagtgtcctgtacctgcaccctcgggaactccccgtgtatttcgtggcgatacccgagggtgaaactctcaaggtgaaggtgtgatgtactatgacggaacagcagcgaggccgcctccgtaaggcaatccacatggatctggagggtataggcgaagatacctccgacctctacgacaacatacataagatagacggcctgctgggccacccaggtaagcccccgcatgattggggcttctatgtactgatgttcgtcatgttcattgccttgtgcatggtctacatcaccccccctcatcaccaataaggatatagcctatgaaagccaaagtcttctatgagcgactgaaaacctccggcgagctgaccctgaatggcggcatctacaaggccaccaaggttcctgcgccacacaagggtaagcagcagcgtcgcggccccttctaagagggcgttagtaatacccctaggaactccctgggggtattgctggctaactcaaccaaggagaaaacaaatggcccgtatcaagtatgccttcggtatgaaacccaagaatggcgagggtaaagccctcaaggtgatgacctcttcctcctgcttcggtaccatgggaggtcaggtaacccacggctataagctcgacggttggaccttcatctgctcccgccgaagcaagaagttcatcgatgtactcaacaagtgtacccaaggtgaactcaagaccatcaccatcggcggcaaggccttcaaaatcccgaaggtccacttctggtcttacgaaagcaagtccaagaattcccccttcgagaagtattctaacgggacggaaatgatttcccccacacatcacggaaaggaaggtgtctgcggtatctacttcaaccccaaggtacacaccctggattcctggtaccccatcatgaaattcctcttcaagatgatctccagcggactcgactaccaaggtcgtgaagaggaggttcacctgaagcttgctgagaagtatggcttctggaagtcctacctcgcaatgtccttccacggactgatagccaatggctacaccgggtacccactctccaactacatgttcagtagcgattgggatgatctcaagaagggggatatccacatccaatccgctgaagagtctatgcgattcggtcgttggatggccaatcgggatgccccaggtggacgtgagtgggtaaggagtacaccctggcggtctgaattcctgaagattcagttggacaaggtggagatggttaccatagaccctcagccaaccgttttcggaaagaaagacccctacatgaccgtagatagcgaggtgggaggtttcatccgcctttatcctcatacctgtgaaaaatacggagtggtcatgctggggatcatgggtgagattggctggagtcgtgacataaaggatatctcactggctctcgaagacttcatcgagaaaaacttctgacaaccaaggagaaatcaaatgggaatgtatgcagcccataatgtgtactataacgccgaagggtctgtggtacaccactactcggtcaagatgatggccgaacatacaaactgcttcgggtcctattgcgaccagacctccgccgttgggggcgaccggtgggttaccgggattggccacctgttggtgtctacccacgagaatacctctggtaaactggtggagttcctgaacagtgatctggtcaacaggattaccgacggtggtattctctcggcttccatcgactggcctactcgttggtgggattacactggtgatctcaagaatctcagtgatcccgaccacttctctcccccaggacgccggcaggcagtctatgtacgggtggacctcaggaagaacgcatcggccatcatttgtgccctccgaatgggcgatcgtctgtgggcaataggtgacgcattgcgtcgctatacccaggaaaaccgtgataaggtcctgggatgcaatgcagagatcctcaccctcgcggcttgtgcccaggtaggaagcactgctcactgcgacagctatcctgccatgttcccggtgactgccggtgaataccgggaaggatgcgaaagtcacggatgggaggtggacgacagctacataagcgaggtcatggatggtatcgtaggtgggtacaaggagatcacctacttcgatatcaagagcatccatggtcggactcgcgaagagttcaaggacaagctcaagcatcacaacgctgagttgtggcaagggtataccaaggacgattgcttgatcgaatacgacgggctagaaggtgtacctaatgaccgaatcctgtccatcatggccccaatcaccattgacgtaggtgacccaggtcgggaaaggtccgaggtcgtacccaccagccaatacagcatccccgaaatcctcgaaaaactggagaacatgcaatgaacaacgcaatccccctgatcggtgcagatcccgaagttttcgtcggctacgaccgtaatccccagagcgtcatcggcttcatcggtggaaccaaggaagaacccttggctgtatccggtggtgctgtccaggaagacaacgttcttctggagtacaacatcgacccggccagtaccaaggaagagttcgtggagcgtatcgtctccgttcgactccttggtgcccagatgctccaccccttcggcatgaacatcatcgagaacctgtcgtctcacctgtacgacgaggaactcctccgcagcttcggcccacaggcttacgtcttcggttgcgagccggactacaactgctggactcgtcgtcagaacgtgatgccgaaggatgcccctccgaccctgcgcactgctggcggccacgtccatatcggcttcagccacatcgagcgagtcaccaaggctaccacccgagaagtcatgcagatgtgtgactacctcctgggcctagcctctgtcatcctcgatggtgacacccagcgtaagaagctgtacggcaaggctggtgcaatgcgctataagccctacggcggcgagtaccgtagcctgtcgaacttctggatcttctctgtagacctgaccgagtgggtctatgaaatggcagtacaggcttacacctccaagcacctcctggaggagtacaagtccatcgtatctggcgatgaagtccagcgaatcatcaacgataacgacggcgctgcggcggtagctgcacttcaagcgctgggggtgaagtatgaatgacctgaataatcgccatcggttggccggggacttcaacatgtactactcctccacctatgccttcttccgggttgacggcgagcctcgggtagtgtacgtggacgataccgagtccattggtgacgaccgtcaattcgacgggtttcgtctcctgggtaatgtgtatcgccctgacggcagtaactactacggtggggttgtctacagcgaggtagaaagcgtgcggccctccagtgggtactatgacgtctttggccgtggggttcgtgatacttatgtatccttcctcgtgaacaatcggactcagcgtaagggtgtggaccccaggaacatcctgctgaaccatgctcaacaggccatcactggcgaaatgatgatccgaatcttcacccaggccgaggaaatgatctctgccccatcccaccgggacttcttcatcaaggatggggtagttcactggaagggggtgaaggttggtcagatggtagatggccgactgtccgcagatgaacaattcaagaaccaggaggacttgctatgtcagttattggcacacagatagggttccgtaagaaccagatcattgccccggaacatcacgaggaactgcctgcggttgcttccttcgggttcgaagtcgaactggaaggcctcaacaactggccggaagtggacgggtgggatctgaagggtgacggctctctgcgggatggtatggagtatgtcttctccggtcccgcctctggccagaaggcaatcactcgggttgaatcctttgtgagtgcgatggaggaaactcctccggcccccaccttccgttgctccacccacctgcacatggatatgcgggacgtagagtggccggtttatgaacgaacggtcctgacctacatggcattcgaggatgttttcttcgatcactgccagccgtatcgtcgggatagtaacttctgcatcccgttcttcagcaacgactggctggcccagaccttcggtcgccgtatcctggccccggaaggtgaccgagagaaagtcttgggtcttacctcctggccaaagtattcggccttgaacctccaggtaacccacaacttcgggtccatcgagttccgtggggcccatgctctcactactcggcaggaaatggtaggcctgatgcagcgtatgttgtgtctcaaggccttcgccatggctcacgcagaaaccccgctggaagagttcctcaaggtgctctccgaggtgaatctccgtgatgtattcttccttggggtatctccggactatgaaatgtctccgggtggtcgtgaaatggggatcgccagtgctactctcgcggtagcaaccatgggctttgttcgatccggggtagaccccctggaggatgaacagaaccgtcagcgtcgtctccgggagcaggaacgtgagcgccagcgggccttggatcgtaggctgctctttgctcgcgctattacctcacgactactagatggtgcagcagagcggtacaacttggcaatggtgccaggtacccaggttcgactggatacagcgatcactgcggtaacctctctgcgtcgtattggtcaccaagtgcgtgtacgagaccttctggaggaccaagaggttcttcaagatgccttcgtactgctcatggataacccgcagcaccttcagcgccataccggcgtaacaatcgaaccagatatgtactaaggagaaatacaatgtgtggattggtaggcttctgtgccacaactaacgcgagtgataacgaaatcgctcttctcaaatccctcctggccgtggatattatccgtggtgctcacgccaccggtttggccaagatcgacccggttaagaacgaggtaggaattcacaagcgggcagtagatgcctacgacttcctggctgatcctgaaaccaaggagttcctggacaagggtcgggctcgcatctacctgggtcacaaccgttacgccacgatgggcgacaagacggaccatgggaatgcccaccccttccaggtagaccacatcaccatggtacataacggtactgtagatacctggggcctgcacctgctggatggcaatgataagtacaacgtggattcgaacatgctgtgcgctaccattgccaaccacggtgccaagaagacgttcgaggagaagttctctggtgctgctgcggttgtctggtgggactccaaggaacgtagcctgaacttcatccgtaacgaggatcgtcctctgttcatggcggttaccaccaccgggaccatcgtatgggcatcggagcctgggatgctcaaggttttcctggagcgacccaacgctaagatccgcctgcgttctcccatcgctgaactgaaggctgaagtcctggtaactatcccgttcacggaggccggagtgcgaaagggtgcagaaccccagaccactccggttacatttctcgaccttcccatccccgaaagcgaaaggcaagcagcggcatggtggagtcgctacgtcggtgtctcggactacgatgactacagccgaagccaaggcagccaagcgggaacgaaaggcagccaagcgggctcgtcgtatggaacgtctggcgatgcgtacgcaaggaacaccctccggatcaacaacaacctcgacgcagcaggtagcaccttcaagcaccggcaactcgtcacctttgatgttgtcaagatcgaagcctacgcaaacggaagcgagtacggaactgtcactggaatcgagcgtgaagaaaaccttctcatcgaagctcatggcatcaacgtctccaaagtccacggatacaccgtcctccgaggtagtatctccaatgcctacttcatcggccaagaccgtgatctcaaggttactgtcgaggatctggcggtaagctgcctggacccaaagcatcggccgactcctggggagactaccccggttttgaggattgggacgatctcctcggagacgaaatcccattctaaacccagggttcaagtcggcggcacctcggggaatacccctccggccaacatcagctaccccttgaaggttcagggacacacgttcaacaacgtacatgtctttcgggacttcgtatcccaggggtgtgcatcctgcgggaagattccaaccgcatatgaccagcgtaatcgtcatctgacggtatacgaaggtgccaagttcactggtagcctggatgagtgtgagttcatctgtggcgagtgtgtaatcgaaaataaataggaggtcaaaatgacccaagtaacgatgaagcgtcaagtagtgatccagatggagaccgacgcaacccgaaagtatcctttctcccgtgacaccctggacaagatccagtcgattcgtcgagtcaaggagcaggaactcaatgatgccaacccggacgaggaattcctggtaccggccccggtagtcattgcggaagctatcgaccgactcttcgaagactacttcgagtaaggtagtgcgttagtaataacccctggccgacccatgccggttcctaagatgtgtacatgggatctgacttaggaattcaggggttattgctggcttcactactaccctcaacagaaacaggagatatgccatgttctacatctacaaaggttcccgagcttcttccggtgccgtaaatcttcgcaatgcccttggtgcccgaatccttcggtccgaggggtctacctaccgtggccgtgcgggtactgcggtaatcaactggggtaccgtaggtgcagaggctcaccgactccgggatattgcccctgtgttcctcaacgacccggcagttgtttatcgctgcgctaacaagctggagttcttccgccacttcgaggccaatgcccctcacttgattccccgctggaccgagcgctgggaagatgccttgggtgtactcaatatctctggtcgcatgtatgcacgtaccgatctgaacggccatagcggtcgtggtatccatctggtgtgtactgtcaatgatgcagaagttgctgcaatcgatgccctccgtagacagggccactacccggtacacatctacggtcacacccacatcccggatgttatcaccagggcacaactgttcacccagggaatcgtcggtaagcgtaccgagtttcgagcccatgtgatccgtggggaagtagtacttctccaagtcaagctccgccgtgttgccaatgaaatggtgaccaacgaaggacaaagcatcgttcgtaacgtagctggcggctgggtctacggggttaacgatgcaatggaccgtgatggtgctgagcaggctatgtcggcggcggcagaagcaatccaggtggctggactggacttcggtgcagtagatatcatcttccagcacgccactggccgggcctttgtcctggagatcaacaccgccccaggtctggacgctgaaggcagcgccctggaggcatacgtcaagggcttcaacaaaatcttcgaggagactatctaatggctgttcgtgttttcgtttatggtactctcctgtctggtttgtacaaccactaccttctggaaggggccgagtttgtcggcaatgctgtatcctgcgagcggggtctgatgtactccgctggcggcttccccatcctctccttcgcctcccgcgctgatctcattgtaggggaaatctggcaactccccgaaggtgagaagggggaggaaatgctggagaacttggatgccctggagggttatcctggttggtatgatcgtaccctcaaggatttccgaatcaatggggaacgaatcaaagccctggtgtaccatcaggatagccacatggcgttggatatcgtccaagatggcgactggaaggcacacctggcaaaacgacaaggagcagtataatgaatgaaatgaccgtagacaaagcagtagaagtctaccgcgataccccgaacaccttcggacaccaagagctacatgcccagaagatgctcctcaaggagatcctgggccttgtcgcctcccaacgacacctccaagattccatcgaggtctccaagatcccggaggcctcggatagtcccgagaccagctatggtgggtactgtgacgagtctgttggtattcgcttcatgtgggagcgactgaagaagatcgaggatcgactccgtgaactggagaaggtctacggtactttcgtaacaactccttacaagaccctgccgggtaacgtcaatgctgtaccgagcttggtactcaagagccagatggaggaataagtgaagcagatcatcggtgatacggcttgtccgggttgccgagctaaaggtggggataaaacaggtaatcacctcatcttgttcgtagacaaggagaaaggtacccgcttcggtagttgtaaccgttgcggccactatgaagttctcgaagaagggttcaaggttcctgaacgaagggagaaatccgaagaggatatcatccatgaagtcaacgaagtccttgagtatccaactaaagccctcgatactcggaagatcagcaaatcaatcgctgaacgatacggggtacgtgttggtctatcacaagaaaatggtgaggacgttatcgagcattactatccacgcacccgcgatggggagtaccgagcgtttaacgtccgaatcctagaccccaaggctttctactatcgtggtagccccaagggtggtgttgaccccttcggttataacacccttcggcataaggatatgggccacctgcggttagtcatctgcgaagatgaactgtcggctatgtctgtggcccagatcatggagtcgaaactcccggagaagtggaaacatcttcgtcaggcatccattagctggtcctcgggtgttggttctgctggacgggacattgcgttccttaaggagtctggtgtccttgagcggttcaacgaggtcatctattgccacgatgcggacgacgaaggccgtaagtcagtagaaaaggtacgtgccctataccccgagtgtaagtttgtcgagcttcctctgaaggacgctaatgatatgcttatgcgtaaccggggggatgaggtttaccagatgatacgtttcggcagcaaggtcaagtctccggactgttccgttactgtcgatgaggtatacgctgaggctctggaaccccccaagtggggcaagagttacccgtgggaaggtttaaccaacctaacctatggtcagcgggatggtgaaatcatcggggtaggtggaggtactggcatcggtaagaccctgttggcccacgagattgctgcctggaattgcattgagcacggggagaacgtagggacattcctgttggaagagcaggtagccatgacactgaagaatatcgcggggaaggtagctaacgtacccttccaccgaccggatatcgagtgggatgagcaagcctttaaagacgctgcgggtaaactccgtggcaagctcttcatgtggaagaacaagggtcagaacgattgggatcatatcaaggaatgtattcgcttctgggcagtagccatggatgtgaagactatcctgctggataacatgaccgccatgaccaaccatcttagtccttccgaaatgaacacggagatcgcccgtatctgtacagagcttgcaggtatggccgatgagttgggtcttcggatcttcatcttctcccaccttaacccgcccaagggtaatcgtacccacgaggagggcgctgaggtaaaggaaagccagttcaccggctcccgagctatgcagcgttggtgtcagcttatgatcggcttcgagcggaacaagcaggctgacggggaagagaagcacgagagcagaatccgtgtaatcaaggacaggaactacggtaatactggcctagtgtttaccaagtataacccagagacgggtcgcttggttgaacgtgagggcagttacgacgaggtacctgctgacgatgacaccccaatttgattacgttatctatgacctagagggggacggcctcttcaatacggtcacaaggctttggtgcgctgttgttgtagacattccgactggggtagtccggggattccggcccgaggaaatggatgtgttctataggatcatcgcccatgcaaagttcgtagtcggtcacaacatccttgactacgacaaccgggtccttgagaaacttcatgggattatcatacccccagatcgaagctatgacaccttggttgcatcgaggttgacttggccagataggccccagggtcattccctgggagcctggggtaagttcctgaagtgtcacaagggtgatttcaacgacttctccaagttctcagaggaaatgtttgagtattgccttcaggatggagtggtcagtcacgcactgttcaactacctcctccgggtactcggcatgacttggcaagagcttgttgaatggaggactgtagattggctaaaaagcgagtgaggaactacaagcgtgagagagaactggctattcgacgcggcgaaacgggcgtgggctctaagtcaggagatgctcagcgacaccgagcccgccgaaaggtggaaaagcgtcttggcaggaagctcggaaccgacgaggttgtcgatcatatcaaacgtgttaaagatggtggcggtaacggggattctaaccttcgcgtccgtggccgttcttctaacgctgctgatggtggtcgggtgggcgatcgtaaagccaaaggcattcgcaagaaaaagtaaatgaagaggggccttcgggcccccgaggactcactatgttcaatcgaaagcttagcatcagcaacatcctcagttccttcgacaaggtgctggttaacctgaagacctttatccaagagtcttcggaggaatctgaacggatctacaacgagatcagtctcctgaaggcggagcgtacccaggtcatgcaggacaatctgaaggcccagaaggtactggctaatctggaagaactgctgggaggtaagagtgaagaagtatcgagttaacgtggggttccaggacaccaaggtgttcaacgcagacttctaccgaatcgagttggatatcatcagattcttcgctggtgattccgatgccaaccccatgaccgtccgagctaacgagatcggtgctgtccgcggatgggtttctgtagaggagatcaatgatgaccagtaagaaggaaagcctggaagagcaggcgcttaaggagatcgccctggagaaggaattctctggtagctggggtggccccgagatcgacgctgatgacttccccttgggtagtgcctgcggcctagaccccgaggtgtgtgagtcatgtcaataaccctacaagtcctagtcatcttctggagtgcattcttccaggtatttctcctgggtctgaactctaaactccttcgggatgataagatcaaggctgggtttgtagtatcttggtgtatcacgctggctcagtttgcttacatcaaggcggtagcctcctcccacttggagatcggatggtttatcttcgtgtccgggtggggaggtgcccttgggattacctctgctcaatacttctacaggtggtacgacaaagtattccacaagaaggcttgacaaatccagaaaagtgtggtataataaccttaaggtgtccggggttgctttacccctataggagatacaaatgagtgaccatgtaagctattccaaacatgtccgtggtaagtacctgtgtaatatggcctctgccctccataagagtatggagatacaaaggactaacatccggaagttcctcagcagtccccaaattacccttcgggagaagcgtcgggtattcctgagcctccccgctggattcctgggggtgagctacttctcaggctcccacctggatctgagttcctactcgcctaaacgcaatagccgggtacgggagaaggatctgagcctgtacgacgacttctacatcgacaggaatacccagctagatccgcgagacctcttgtttacctcccaagaagagaagaaatgggagtttaaatacctgaaggagaagcggggtgatgggttcgagctatccgatgaagaactgagcgacgttaaggatatccagcgcaagattgacctgtcctggtacctggtagacctggcctgtgagcgtgggtgttcctacttcattttcgactggtgattacatgagcaagatcaagagtattctcatggagcggatagatgacttcctgctcaaacaagttgctgtagccttcctggagcagcaatggaagttggaccgcagtggtaccgtggactacctctcctacctggagggtgtatcccacgaagctgtggagacagttgtagagaatctggcggagcgtcttaagggggattaagtggattggagaaagtcactgttcgttgagcacaaggtagctgatatcatcagccgccagagtaaacgtggagtctacttccagactcagcgggccaagtggctgatccatgtgcttagcgaacgaatcctcaagattgaccttgaggctgtcccccagatgcccatgatgatcgtaagggctggggccttcagcaagccattcctaaagagtggtaagccgaaccaaaggctccagtccctgtggcaacgtcttgggcacttcgaggtatctggtcccttctctgcaatcgagtatgtacccttcgaccttggtaagactgccaagttcaaggactggatgctggatcagggatggatacctgaccaatggaacatcaaggatattactgtcggcactgatggcaagaagctacgtggatctgaccttaatgaatccttgaataagtacattgaggatctccgacagagcaaatctggacgactccgaatgaagctccaggggatcatccctgggaaaactaccattggggaagtcaagagaaagctcgaaaagcaacgtaaggtcctaacgactccgaagatgactgaagagtcgatggataccgtccagggagacctgggcaagctggtgatgcagcgaatggtttgggcccaccgtcggtccctcttgcaggggctggtagatcaggtgaggcctgatggacgcctagaggggagtgctaacccctgtgcaacacctacgggccgcatgaggcaccgtgtagtagtcaatatccccgctgctcgttctcctttcggacctgaaatccgagggttgttccaggggacacctgaggctggtgaatggaaatggactgtcctccgccgtgatcttggggagaacgaaagggttaggcccttcactaacatcgtggaggaactcaagaagggtaagtggaagactgtaggaaagtaccgggtatacgtcccagcgaatcaattggtattcgtgggctacgatggtgctggtctagagcttcggatgcttgcatcctacatcaacaacccagagtacaccaaagaggtggtcgagggtgatgtacacacggccaaccagatagccgcagggcttcccacacgggacgatgctaagacgttcatctacgccttcatctacggtgctggggatgccaagattgggactatcattggaggcaccagggcagacggggctagactccgggcccagttccttgaggctaaccctgaccttgctgcactgattgagagggttaagcaggaagccgagagaggttatctcgaagggctagacggacgaaagctaaccatgcgacgttctgagtctggcgacgtgatgatccataaggcattgaacaccctcctgcaagcagcaggtgctattgtcatgaagtgggcaatggtactcctggatgagcgagtccgcaggttaaacctgagggcttggaaagtcctggatatccatgatgaaggtcagtgggaatgccacccagaggatctcattgctctacgtggacagatggaaatctgtgtccgggacgctggagttctcctcggggttaactgtcctttggctagtgattccatcgctggtcgctcgtggtatgacacacactgatacatctgggggttgactttcagccccctttgtggtataataccttcttccctacgagaggtttaagatatgtctaagaaagtatcccaacgattcaccttcccggtagcgaagctgatcttcccctacatcgtaactccggacaccgagtacggtgaagtctaccaagtaaccatctgcattccgaccaaggaagaggccgacaagctggtacagcagatggaatccaaagatgcccgtctgaagggtaccatcaaataccaagagcgtgatggcgagtacctgttcaaggtcaagcagaagaagcacgttgattggatgcaggatggcgagcgtaaatctgctgtaatgaagccggtggttctgacctcggataacaagccgtatgacggccccaacccgtggggtggttctactggcgaggttggtatcctgatcgagactcagaagggtccgcgaggtaagggtactatgacggccctgcgcctccgtggtgtacgactccacgagatcgtatccggtggtgacggtgaggatgatccgctgttcggtggtgccttcaccgaggaagagcccgaggatgtattcgacgaggtattcgatgacgaagacgctcctatctaagggcttggaggatcacgaggcgggggtatgccggtcaggctgcccctactgcttaattgaattcgagagagtgtggggtgtacgggtggtgagttctacagctgcatctaataataaagtagaggtcgatcctaatggaatcaaacctggtgagccgggcgctaagctcgatagcggcaaggtggatgttggaatcatcttcgaagcgttcccgagggctctatatgcagtggcacaagttgctaacttcggagccagcaaatatagtcgcgggggttggaggtctgtcgagaatggtgtccagcgatatgacgctgccttcgggagacacctccttgagcgacacaagggtgaagctttggacccccaaagtaaactaccccaccggtatcacgaagtgtggaacgccctagcgtccctggaactcgtcattcagcaagaggaggaatccaatggaacttctgttggacccaagggctaagactgttcctagcaactactctgtgattggcgtcgatgtagacctggggcttaccccaggctacagcctaacggaggaagctatggacaaagccaagcgtcaagagagcgagtattacgactggaaggggtatgaagcactggccaatccagtggtagagcacccagagtaccgagccaagggtgaagcctttgccctccgtgtcttctgggaagagaagctcaaagaatcccaggtcgtagaagaggtagcgtgatgatagctggtatcgatggtgacgttcttaggtatgagctaggccacgtggctatgtcgaaggaacacatcttcgatatccaggtggagaagccatggcctgaggaagaggtccataagctcgtcgatgataaagtcgaacaaattatcaaaagggtaaatgcagatgagtgtgaaatctaccttactggccaaggaaattttaggctggagcttgcgaaaatcaagcaatataagggtactcgaatcggtcttgaaaagcctcatcactgggaaaccgtgtcagccagacttaaggacaagtggggagcaatcactttccacggtatcgaggctgatgactggctcgggattcgagggactgaagagggagataactttacagcgtgttctagagacaaggatatccgccaagtcccaggatgctaccattacagttggccctgtggagattcccagccggagttgggaccatttcaagttgatggccttggaacagtctccgcttcttggcgaatgtatggtgttaagaaaccgcagaagtcatggaaacttgagggcaacggtacggcattcctctacgggcaactccttgttggtgactccgtggataacataccaggcctcccagggacgggaccaaagacagcgtcagatttgcttggggagctttctactgagagggatctcttcgcagcttgcgcttacgcctaccaacagaagtacggagataattggaaggagtaccttgtggaaaactttcgtctcctctacctcattcgggaccgctcttggcttgatattcagcagtccggtaacgagtatcactgctcactgaagaaacattgggagattccctatgacgatgaagaaatattctattgatgaagcacagaggatctgtgaaggtctctttgagatcctcgaaggtcttggcttcactgactacaaggtcgctggtggtttccttcgggatgcagacaacggggttgcacccaaggatgtcgacctctatgtccgtaggccatacgtggaggaccctactgatactcgccgtagccggttcggcccacggtttatcccctgtgatgatgataccctagaagtagaggtcactcggttctacaacaagctgggccacaagaaggtccggtgtaggactggagataagcctgatgggtatcctgcggggtttgatgtgtgggaatctattggtgttgacctacccgtcaacctcgtcgtgactactcactcccacccagtagagttcgatgtaggactatgtgagatcgcatgttggcctgtaaatcggttgggtttgaagtctcaaatctaccgcacaaaagcttatgagtttgataaggaagagaagtgcattaccctgaaccgtcttctggaccctctcctggatcattctcaacccctaactgacaatcaagttgaaaaggttgtctctcatatccaacgtatcaaactgaagtatccggagttccgggtgtgtctaggggattgggtttggctgctgatccggtctaactctgtcctcactgaggggacgctatcggttgtccgtaagcttcaagaaggagggctcattggcaaagcaggggagattcttcagacccaaactgaagtcattgattgggacgaagtacgacagcgaaaccgagaagatcgtccacgagacgatgccttggatgcagttcaagccggagccggtaccatacgtcatcgaacacaagtacaagccggatttcaaggtatcgaccttacaaccctgtggatcgacgaagcatctgctggttgaagtcaaggggtacttccaggaggcctcggaggcagccaagtacgtctgggtgagggaggctctccccccagatactgaacttgtgtttatcttcgagcgacccaacacagcttgccattggctttccaagcgtaaagatggcacaaagcaatccatggcggaatgggccgaacgtaacggattccgctggtttactctagagactttcaaggagtccttccctaatgagtaagaagtataatgaagacactctcgtcattgcggacacccaagttcgatccgaggtcaacatcgatcacctcgggaaccttggggagtggatcgcacgtaaccgccccaagcgaattgttcatattggggaccattgggacatgcccagtctgtcaagctacgaccgtggtaccgctaagatcgaaggccgccgagtcctcgctgacatacaagctggtaatgatgcgatgcgagttctgctcgatcctcttcgccgcctacagcaacaccaagcgggttgtaagaagcgtatctaccgaccagaaatgcacttcttcatcggaaaccacgaggagcgtatcaagcggtatgaaaattctaaccctgctctccaaggttttattgggtacgatcattttgatctgtccgattggattgtccatgatttcctcgacgtgggtgttatcgaaggtgtcgccttcgcccactacttctacaatcccaacagtggtcgtccatacggcgggagtgccgagcatcgcctcaataagatcaagcgcagcttcgtccaaggccatgagcaagggttcaagtaccacatcgaggcagtaggcaagaagcgaatccacgggcttgtagtcggtagcttctacacccacgatgaatcctacaagggtcctcagggtaacgaccattggcgaggtgtagccctcctccggaaccacaaggatggagagtacgacctcaaactgatgagcgtggaggagttcctgtgagtaagttcttgccagacctgtactacattaagtctgagcatgacttcggtcaacgggggttggcgtttaagacgccgatctccgcagaactctggctggatatgaagtttggtaaagggggtgcagaggaggggcttaagcgtgggatgtataccatcgaagtcctggagatcctctacatccccagtgttcaccttccgaatatcttggggtaagctatgaaagatcgagttggacgtaagctagaggtaggggacagtgtagtcttcctggtccacaggaacacctcctcccatctagccattggcaccgtcgatgggtttacccccaagatgattcggatcaaatgccagaccatgagttggactattgacgctgagtatgttctcaggagcagtgacaaggtggtgtactatgacaaaggctgaactggagaaagcacttgaagagacgcaaagcgctcttgcgaaggctgaggcgaaggccttttcctttgaagaactggctgaagaagctaaaagacagattgaattcctcgaagggatgctagacctagtagaccttagggcttctgtattctacggagattggaggggttatgcagaaagatcaaaagggtaagggtggattcccttggacctacattgcggtagcagccttgtttgccctgctggtttatgtaggatatagctgactgatgttactcctgaccctgggagaaatatccagactcctcatcgatgtattatcttgggcaggttcactgtaggtatccatcgagtaaccaaaaaaaggccccaagggtatcatcccaaggggccttatctttagctccggagagcgttcagcagtgtgttgaacttatccacgagtgcctcgtgagtatccgtataggaagccacggggatctcagatatcttatcctggatggaagccgcaatggcttcatataggccactcacttcgctagccttaggcttccagttacctggtttagcctcactagccttagcacccacctccagaagcttaggcttcccctcaatatcctcccacttcactggctcaaagtctttcgggccaatgacttgtcggagggtcccatcctcattacgaacagcaatagccttcgattgaataacgaatacactgttgccgtagttgtcagcgatataacctgccataatctaactcctaattaagctgccgatttgaaggtacccactgtaccaccgaaaggatacactcggacagtgcattccccaaattgaccatcagtctccgtctgattacccttagcataccaagccttgtccggagatacagcgaacttgatcttagctgtagacccttggataaagtggaagtgacaacctggggttacatctggaccaagagtcacggtgatatccgtggtcccttgagacatgaagaaccaaccagactgctgcttagtcagggtaatgttctgagtaagctgctgggtgttgacgacattaccaccaaggtgagtagtcacgaggcgggggtccaggtagttctgttggagagaaccaatgttcttcacaggaccacgcatgtcatcaaactgctcgataatgtaatccccaatagtaccaccgttctggtcatccgggccaatcacatgcttaatagccacgtaaacacccaggtgttcccgacggggatctactcggaattcactaccgaaggcagtaccgcaaggtgcctcaatcatagtctccgagaagaggccaatcacgtggccagggtcacggttaccacccgaggtttcaccaggagcacccacaagggtgttgaccaggacagaggggataacggcctctgaggggttctccgggaaggaggctgtaacgttctctactaccagggctgcgttctccttaactgcataatagtcagggaggaactctgtagcggtaacgatgttagtatttacccgaccggcatccgaggtaatctcaatgagatcaccatcggcattacgtcggaagacttttggcacatcaaccacgtaggcacggccaccaggaccagcggcatcagtttctacataagttgccatattacttctccttaaagatccagagcatcttccatcgcttccataccggcaacgaaaggacgtgctggagtttgcttatacaagaacttccagatttcacctgcggatgggtcatccccaaacgaagcgatagttttaccaacagccatagcaccctcagttgcagcaccagctactggacccaatagtacctctgcgggggtagtccctcggcggtaacccgttagcatgtcgtagatcatagaagcctggagtggcatctgttgcatcactacgtccatcatccgttgttctggactacgggtatcctctcggctagacccaccgaacttagccagttgacgaagctcatcctggagataccccaggctcatcatcagaccaagagtgaaggctacacctgcggcacccataccagcgttggtccaagaaccagcgaagtgtgggctcagtcgtctacggaacatcggtaggatgatgttaccataggctgctgggtaacccttcaagagggagaacatctgaacgtttccgttgctcatccacataggcttatcagcgaaggtggggtcgaggactacctgatctacaaaccgacgcatggccaaggtcttaacgttgttagccatcaggacttcagatggggtagccggggagatcaacttgagggcatcctgctggctacctatgttaacccccatttcccgaagctgagcaaccttcagagcgccattggcagaactaaaggggagccctgcggctagatccatcaggttgttctgatagaccctcttggcagtctctgttgcaaatactcggttaacatgggttaggatggacaagccgttaatgaggaactgaccacggatcgtcttttggatagtagagttaaacacctcagcaccaacccgatcagccatcagagaggtagcagaggccagggtgtggttcatatcactcataaaccgaccggtctcagacttcggaatcccactgtagatcctgcgggctgcttgccttactacctcacccatggttgggagtacagccccaagggtaggcataaccccagccttagcgaattgtaggctgaactcggttagggtcgagaagccggcgaggggaagtctggagagcacgagggcacccgacgtaacagccgctagcttcttaaggttaggatctttgatacgaccgtgcataccattgtaggcatccactagatcatacatccgatccacctcttccttagtaacccgcttaccagcccgttgagcctcagctacagcagatgcaattttagcgttagccttctccccgttgataccaaaccgttcggtaaaggcaatccggtgggaagccccttcgaagtagtcccggatttcctggagacgcttcttaggagtatcgttcagggagtatttattcaggatctcctgaggtacagaaccaaaggcccggctctcttccagttgaccatacttaggaactgcatcgctttgggcaaaccgtccacgtagagtatctggatcaccttggatacgataacgagggtctacttcccaagccccggtctgctggttctgagtaaccagtcggttaacctcaggggcagtgttaccacgagtatcatccgagacttctaccaaccagttggctacagcatcttcagcagcttgacggttctggaagtacggagtaatatcattcaggaactcgggggtctgaaccttctctggggatagaccgaatggcatataatttgggatagtaccaacggacatcccaccacggttaacagcctcattccttacgtcatccatcaaagcacggagacgggtagcttctggggtattgacacctgcggatgtatcagcgataatcctatcgatctctttggaagacttaccctcaaagatattatcaagttcggagttccacttacctgcctggagttcctgatcctcaaagatggtcttaccagaggctcgcttaccactcatatcagcacggaaggtctcagagaactcacgagcgataggagaggccttggcgagtggctctaggagcgacgtagcttcgtttcctagggcatcccaggctttcttgaccgtacccctaggctctagctcagacgccttaggaggggccgcaggagcattaggatcaacaatggcagagccagctgaatcctgatgacgacccagggtgtccaaaccagaggatacagcaccaccagcagtacccatagctgtaccagtaaaggcagccgtcaggaggttatccatgaactgctctggggtttgtacctgccctactgcatcataggcgatggtatcctggagggcctgctgggcaccagaggtaacaccttcagccacaccagagactgctgcatgcttaccagcctgggtaacagcctcgatagcggtttgcttaggtagtcccgattggaccaacatctggtaagcgccatctttaccgatgtgcttgaggagtggggcagcgataacaccagcacccgcagtgtctagtaccgagaggccagcaccaccgaggactgcggtccatgggttgctttgatcggggtctagttccttcatctggttactcagggcacctacgttgatacccatggaactcaggaaggaaccaatgagcgctccacccatacgaccaggggccccaaagacagagccagccttagcacctgcggcaccaccagcaagtaccggggccatcgaagggagagcctctacgatattattcttaaggaacgacccgatggatgggatatcttggatatcagcgaaagaccgaacatcaggggttccgtactgtgacgcttcctgagcattctcctcggccatctgtgtgccgtagtctttcaggtagtcacttccagtcagttcaccaagggtagcaatagtaccaccgatgttagactgcatggtatcaaccccacgaccaatcgcagagctaatagaattagggtcagccggagttactagggcactcaggtctggggcaggctcaggggtagcaggggctacttcctggggtgcctcttcgataacctctggctcattcaaggaagccaattcagcggctacgtcgaggcccttgacctcagccagttccgcatcaatagcggccttcagttctggagaaagagccataagtcaccttctagttgctggaaagagaataggctcttaagatgtatcttaggatactaaccttcttagtaagtaagtcaaaaggaagaaggaatcttaagagcctataggtctattatactacattttggatactttgtcaagtaccttttatcgggttggggcaggatagtccagatcagcaccaaaccagttacccgtaggttgaagcttagcagcctcccgctggataatacccactgggttagccccaggattagcccgaagttcatttcggacagtctgggcaatagcctgttgggcagtcttactcagcttcttaccacccagagcctgagaaccattgacttcactcaggataccaagggcgtccttagtagtaacagcttcacctcgggctgccttagctgctgcctgacgtgcctgagcgctaatcctagcggtcttgagtcgtacagcagaacctagctgggcattctcttgggccatgtcctggccacgtcgagtagtttcagcctgtagctgggcccgttggttagccaggtcttggccacgtcgggtcaactccagattagccctatctacagcagcctggttgacccacttatcaaggacgccctcagtcttacgcttggtttgctcaagggtcccttccttaactttcaggttgccctcaccaaggcgtacatcagcagcatccttagccaccttacgctccagatctttttccttgatctgacgatcagcagctgcggcagccatcttctgctggttgatcccagcctgtaggttacgatccagttgacgctcataggaagcagcgaacatatccccagctttaccagtcttgtctatggccgaagccagaagaccagtaccaatgagagcataagatacataacgagacaggtcatcattatccatagtcctcatctgagtcaactcttcgttaacccgattcttaagctcttggggttttagctctacaccctctctctgggcatcagcttcaactacagcctgggccatttcaggacgacttacagcaccagtacgaagaccctcggctgcaccctgttggatgacctgtcgattagcctcctcctcatctgctacagcagcaccagccgcagaggccacctctggagcgatatcaggctcgatagagggttggttaggggttaccccataggacaggagttcagcccccgtagggcctcctgtggcgttctgggctgcacgttggcctacaccctgggcccattggtttgcctcttgagcaacctcgggacccatgttctcaaccgcttggctagcctgagccatttcttctgcacgagtacgctctgcatccccgagttctcctggggttacagcggcttgtacacctacagagataggaccaccgaggatacctgcgatacggcccagggcaccacgacccgtagcctcagccgcaggggccacctcttgggcagcccgagaccaacggtcagggttctctagggcagcctgagcagcccggcggacacgatcagggattcctgagccctctacagccagcggcagtttgttccttgcgattcgcgccatgtccagttcattctgagcagcccggaggatgctagggcgaattggggacccttcataagccatgctggccataggattaacctccaaatagtttacttaggattccagactttggctgctgtccgaaaccgagttcttctgcgctaggaaggattcccactcccgctcccatacctgctgcaacttccgctgcgcctcgttcgcttgctcccctagccccctcgacagaaaagcttggtactgtttctgaagaaggctcacttccttgcccgaggagagccgcgagtgctgctccgcccattgcgccaaaagggtttgattgtccactagactctcccgattgcattgtcccaaggtgggtggggcggtaggaaccttgacggctcaactgtacccgctcctgcccaccacctatattctgtcctatagcgaacagcttctgaggaagggaggccattagaacagaaggcccccgaccctaccaccagcattcataccaacagaagcacccgctgggccaccgaagagagcacccaaggaagcaccaccgagagcacccagggcagacccgaggccaccaccaccgccaccacccgaggaggtagtaacgttggttccacccatgtcgccggagataagctccttgtaggcgagtaggtcgttaaggctgacgttattctcataggcccacttctgtagagccccgttgatctcctgctgctcctgattctgaagcatactaccagcatcaacctgcatggcattaccagagccgagtcccttagcaatagccgagaggttgcccagggtattcaacctattctggttgtaagcctgctggtcttggaaagccaactgggaggcgttattctgttgattctggagcaatctagcggtagcaataccttctgctacacccgctcgggaactcccatactgaccagcattagtggcccctgctcgcaggtctggacgtaccgtagtgtcgaagtcccattgcatctgctcgttggctgcaccaatggcgttcgccaagccagttttgttgggatcgtaaggaccaaggtaatcagccagagagctaacacctgagctacccaggagagactgaagggcactcccgagaccacccaacccttcgattccactaagctggagagcattctggtcagccaccgggtcaaagttcggatcgccaccgtaattggggtcaaagcccccgttatgtagccaatcactggcacccgagagtagttcattatagttaccttgctgatagggtgtagagacagaggtggtcttttgcttcttgctaccacccttgtaagcccgagagtctagggcatcctctacatcgaaccccatcagacgctttacattaaattggaggaagttcatctggagttacctcacgatagaaggatacggagtcttcggtgtacccgagtttctctagggtaggcttccagccccgacgaccttcgcattggataaaccgacagttaactcgttgggcgaactgtccgaggaagtcgtctacctccgagtaatctaccggggtttcattcccaggcatcttaccactccagaagaagtgaaggatattacccaggggtgcttgggacacttggattacaccaacgtagccactctcttcctggtagaagacataggcctcataattaaccaaggagtgaaccaagtgttcgaagtcccaaaacttaccgaggtccgtcctgttgaaggctcgggccagagcagggactacggtaggaagcagatc

SEQ ID NO: 3 - DNA, 45439 bp, Bruynoghevirus EPa4
  source 1..45439: mol_type = genomic DNA; note = EPa4
tatctggtcccttctctgcaatcgagtatgtacccttcgaccttggtaagactgccaagttcaaggactggatgctggatcagggatggatacctgaccaatggaacatcaaggatattactgtcggcactgatggcaagaagctacgtggatctgaccttaatgaatccttgaataagtacattgaggatctccgacagagcaaatctggacgactccgaatgaagctccagggaatcatccctgggaaaactaccattggggaagtcaagagaaagctcgaaaagcaacgtaaggtcctaacgactccgaagatgacggaagagtcgatggataccgtccagggggacctgggcaagctggtgatgcagcgaatggtttgggcccaccgtcggtccctcttgcaggggctggtagatcaggtgaggcctgatggacgcctagaggggagtgctaacccctgtgcaacacctacgggccgcatgaggcaccgtgtagtagtcaatatccccgctgctcgttctcctttcggacctgaaatccgtgggttgttccaggggacacctgaggctggtgaatggaaatggactgtcctccgccgtgatcttggggagaacgaaagggttaggcccttcactaacatcgtggaggaactcaagaagggtaagtggaagactgtaggaaagtaccgggtatacgtcccagcgaatcaattggtattcgtgggctatgatggtgctggactagagcttcggatgcttgcatcctacatcaataacccagagtacaccaaagaggtggtcgagggtgatgtacacacggccaaccagatagccgcagggcttcccacacgggacgatgctaagacgttcatctacgccttcatctacggtgctggggatgccaagattgggactatcattggtggcacaagggcggacggggctaggctccgggcccagttccttgaggctaaccctgatcttgctgcactgattgagagggttaagcaggaagccgagagaggttatctcgaagggctagacggacggaagctaaccatgcgacgttctgagtctggcgacgtgatgatccataaggcattgaacaccctcctgcaagcagcaggtgctattgtcatgaagtgggcaatggtactcctggatgagcgagtccgcaggttaaacctgagggcttggaaagtcctggatatccacgacgaaggccagtgggaatgccacccagaggatctcaaggctctacgtgagcagatggaaatctgtgtccgggatgctggagtactcctaggtgttaactgtcctttggctagcgactctattgctggttgttcatggtatgacacacactgatacatctgggggttgactttcagccccctttgtggtataataccttcttccatacgagaggtttaagatatgtctaagaaagtttcccaacgattcaccttcccggtagcgaagctgatcttcccctacatcgtaactccggataccgagtacggtgaggtctaccaagtaaccatctgcattccgaccaaggaagaggccgacaagctggtacagcagatggaatccaaagatgttcgtctgaaggacaccatcaagtaccaagagcgagacggtgagtacctgttcaaggtcaagcagaagaagcacgtggactggatgcaggatggcgagcgtaaatctgctgtaatgaagcctgtagtcctgacctcggacaacaagccgtatgacggccccaacccgtggggtggctctactggtgaagttggcatcctgatcgagacccaaaagggcccacgaggcaagggtactatgacggccctgcgactgcgcggtgtacgactccacgagatcgtatccggtggtgacggtgaggacgatccgctgttcggtggtgccttcaccgaggaagagcccgaggacgtattcgacgaggtattcgatgacgaagacgctcctatctaagggcctagcggatcatgagtcgggggtatgccggtcaggctgcccctactgcttaattgaattcgagagagtgtggggtgtacgggtggtgagttctacagctgcatctaataataaagtagaggtcgatcctaatggaatcaagccgggtgagccgggcgctaaacttgatagcggtaaggtggatgttggaatcatcttcgaagcgttcccgagggctctatatgcagtggcacaagttgctaacttcggagccagcaaatatagtcgagggggttggaggtctgtcgagaacggagtccagcgatatgacgctgccttcgggagacacctccttgagcgacacaagggtgaagctttggacccccaaagtaaactaccccaccggtatcacgaagtgtggaacgccctagcgtccctggaactcgtcattcagcaagaggaggaatccaatggaacttctgttggacccaagggctaagactgttcctagcaactactctgtgattggcgtcgatgtagacctggggcttcccccaggctacagcctaacggaggaagctatggacaaagccaagcgtcaagagagcgagtattacgactggaaggggtatgaagcactggccaatccagtggtagagcacccagagtaccgagccaagggtgaagcctttgccctccgtgtcttctgggaagagaagctcaaagaatcccaggtcgtagaagaggtagcgtgatgatagctggtatcgatggtgacgttcttaggtatgagctaggccacgtggctatgtcgaaggaacacatcttcgatatccaggtggagaagccatggcctgaggaagaggtccataagctcgtcgatgataaagtcgaacaaattatcaaaagggtaaatgcagatgagtgtgaaatctaccttactggccaaggaaattttaggctggagcttgcgaaaatcaagcaatataagggtactcgaatcggtcttgaaaagcctcatcactgggaaaccgtgtcgtcccgacttaaggataagtggggagcaatcactttccacggtatcgaggctgatgactggctcggaattcgagggactgaagagggagataactttacagcgtgttctagagacaaggatatccgccaagtcccaggatgctaccattacagttggccctgtggagattcccagccggagttgggaccatttcaagtcgatggccttggaacagtctccgcttcttggcgaatgtatggtgttaagaaaccgcagaagtcatggaaacttgagggcaacggtacggcattcctctacgggcaactccttgttggtgactccgtggataacataccaggcctcccagggacgggaccaaagacagcggcagatttgcttggggagctttctactgagagggatctcttcgcagcttgcgcttacgcctaccaacagaagtacggagataattggaaggagtaccttgtggaaaactttcgtctcctctacctcattcgcgaccgctcttggcttgatattcagcagtccggtaacgagtatcactgctcactgaagaaacattgggagatcccctatgacgacgaagatttattctattgatgaggccctgtctatctgtgagggtctcttcaaaatcctagagactactggcttcactgactacaaggtagctggtggtttcctccgggatgcagacaacggggtagcacccaaggatatcgacctgtatgtacgcaggcctcgtgtagaagacccacgtagacgagtctcacgtgtctttgggcctcagatggtcccttgtgatgatgatgccctagaggtagaagtcatccggttctacaacaagctgggtcacaagaaggttcgtactgggtccggggaactacgcaatgggtatcccgaagggttttctgtgtgggagtccattggtgttgaccttccggtgaacttggtcgtatccactgacagtcacccagcagagttcgacatgggcatatgtgaaatctcctgttggcctactggtacccttcgtcgtgaccgtagtggagaaatctaccggtccagggcatatgagtgggacaaggagaataagtgcatcaccatcaatcgtatggttgatccgttgctggagagtggaaacgcggtcaccgttggccagatcgagaagctcgttaaccacgtaaagagggtgaaggctaagtacccaggccaccgagtgtgcattggggactggatttggatgcttctgcgttcacgttcagtctacgcagggggcgcaatggactttatagtaaggcttcaagaggagggtctaattggcaaagcagggcaggttcttcagaccgaaactgaagtcattgattgggacgaagtacgacagcgaaaccgagaagatcgtccacgagacgatgccttggatgcagttcaaaccgtccccggtaccatacgtcatacagcacaagtacaagccagacttcaaggtatcgacctcgcaaccctgtggatcgacgaagcacctgttggtcgaggtcaaggggtacttccaagaggcgtctgaggcatctaagtatatctgggtgagggaggcacttcccccggatactgaacttgtgttcatctttgagcggcctaatacggcttgccattggctcagtaagcgtaaagatggcacaaagcaaactatggcggaatgggccgaacgtaacggcttccgctggtttactctagagactttcaaggagtccttccctaatgagtaagaagtacaatgaagacactctcgttatcgcggacactcaagttcgatccgaggttaacatcgaccacattggtaacctcggggagtggatcgcacgtaaccgccccaagcgaattgttcatattggggaccattgggacatgcccagtctgtcaagctacgaccgtggtaccgctaagatcgaaggccgtcgagtcctcgctgacatacaagctggtaatgatgcgatgcgagttctgctcgatcctcttcgccgcctacagcagcatcaggcgagttgtaagaagagagtctaccgaccagaaatgcacttcttcatcggtaaccacgaggagcgtatcaagcggtatgaaaactctaaccctgctctccaaggttttattgggtacgatcattttgatctgtccgattggattgtccatgatttcctcgacgtgggtgttatcgaaggtgtcgccttcgcccactacttctacaatcccaacagtggtcggccatacggcgggagtgccgagcatcgcctcaataagatcaagcgcagcttcgtccaaggccacgaacagggattcaagtaccacatcgaggcagtaggcaagaagcgaatccacgggcttgtagtcggtagcttctacacccatgatgagtcctacaaagggccccagggtaacgaccactggcggggcgtagccctcctccggaaccacaaggatggagagtacgacctcaagctgatgagcgtggaggagttcctgtgagtaagttcttgccagacctgtactacattaaatctgagcatgacttcggtcaacgggggttggcgtttaagacgccgatctccgcagaactctggctggatatgaagtttgggaaagggggtgctgaggaggggcttaagcgagggatgtataccatcgaagtcctggagatcctctacatccccagcgttcaccttccggatatcttggggtaatctatgaaagaccgagtgggacgtaagctagaggtaggggacagtgtagtcttcctggtccacaggaacacctcctcccatctagctattggtacagttgatggttttactccgaagatgattcgaatcaaatgccctaccatgagttggactattgattctgaatatgttctcaggagcagtgacaaggtggtgtactatgacaaaggctgaactggagaaagcacttgaagagacgcaaagcgctcttgcgaaggctgaggcgaaggccttttcctttgaagaattggctgaagaagctaaaagacagattgaattcctcgaagggatgctagatttggtagacctaagggcttctgtattctacggagattggaggggttatgcagaaagatcaaaagggtaagggtggattcccttggacctacattgcggtagcagccttgtttgccctgctggtttatgtaggatatagctgactgatgttactcctgaccctgggagaaatatccagactcctcatcgatgtattatcttgggcaggttcactgtaggtatccatcgagtaaccaaaaaaaaaggccccaagggtatcatcccaaggggccttatctttagctccgtagagcgttcagcagtgtattgaacttatccacgagggcctcgtgagtgtccgtataggaagccacggggatctcagcgaccttacccttgacgtaagctgcaatggctgcatcaaggccactcacttcactagccttaggcttccagttacctggcttagcctcgctagccttagcacccacctccagaagctccggcttcccctcaatatcctcccacttcacaggctcaaagtctttcgggccaatgacttgtcggagggtcccatcttcattacgtacagcaatagccttcgattgaataacgaatacactgttgccgtcgttgtcagcgatataacctgccataactaactcctaattaagctgccgatttgaaggtacccacggtaccaccgaaaggatacactcggacagtgcattccccaaattgaccatcagtctccgtctgattacccttagcataccaagccttgtccggagatacagcgaacttgatcttagctgccgatccctggataaagtggaagtgacaacctggggttacatctggaccaagagtcacggtgatatccgtggtcccttgagacatgaagaaccaaccagactgctgcttagtcagggtaatgttctgagtaagctgctgggtgttgacaacgttacccccaaggtgagtagtcacaaggcgggggtcaaggtagttctgttggagagaaccaatgttcttcacaggaccacgcatgtcgtcaaactgctcgataatgtagtcaccgatggtaccaccgttttggtcatctggaccaatcacgtgcttgatagccacgtaaacacccaggtgttcccgacgggggtctactcggaattcactaccgaaggcagtaccgcaaggggcctcgatcatggtctcggagaagagtccaatgacgtgacctgggtctcggttaccaccagaggtctcccctggggcacccacgagggtgttaaccaggacagaggggataacagcctcggatggattatccgggaaagaagccgttacgttctctacaaccagggctgcgttctctttaactgcgtaatagtccgggaggaactcagtagcagttacgatgttagtattcactcgacccgcatccgaggtaatctcaatgagatcaccatcggcattacggcggaagacctttggcacatcaaccacgtaggcacggccaccaggaccagcggcttcagtttctacataagttgccatattacttctccttaaagatccagggcatcttccattgcttccataccggcaacgaaaggacgtgctggagtttgcttatacaagaacttccaaatctcacctgcggaagggtcatccccgaacgaggcaatagttttaccaacagccatagcaccctctgttgcagcaccagctactggccccaagagtacctctgcgggagtagttccccgacggtaacccgttagcatgtcgtagatcatagaagcctggagtggcatctgttgcatcactacgtccatcatccgttgctctggactacgggtatcctctcggctagatccaccgaacttagccagctgacgaagctcatcctggagataccccagactcatcatcagaccaagagtgaaggctacacctgcggcacccataccagcgttggtccaagaaccagcgaagtgtgggctcagtcgtctacggaacatcggtaggatgatgttaccataggctgctgggtaacccttcaagagggagaacatctgaacgtttccgttgctcatccacataggcttatcagcgaaggtggggtcgaggactacctggtccacaaaccgacgcatagccaaagtcttgacattgttagccatcaggacttcagatggggtagccggggagatcaacttgagggcatcctgctggctaccgatattaacccccatttcccgaagctgagcaaccttcagagcaccattggcagaactgaaggggagccctgcggctagatccatcaggttgttctgatagaccctcttggcagtctctgttgcaaatactcggttaacatgggttaggatggacaagccgttaatgaggaactgaccacggatcgtcttttggatagtagagttaaacacctcagcaccaacccgatcagccatcagagaggtagcagaggccagggtgtggttcatatcactcataaaccgaccggtctcagacttcggaatcccactgtagatcctgcgggctgcttgccttactacctcacccatggttgggagtacagccccaagggtaggcataaccccagccttagcgaatggtaggctgaactcggttagggtcgagaagccagcgaggggaagtctggagagcacgagggcacccgacgtaacagccgctagcttcttaaggttaggatctttgatacgaccgtgcataccattgtaggcatccactagatcatacatccgatccacctcttccttagtaacccgcttaccagcccgttgagcctcagctacagcagatgcaattttagcgttagccttctccccgttgataccaaaccgttcggtaaaggcaatccggtgggaagccccttcgaagtagtcccggatttcctggagacgcttcttaggagtatcgttcagggagtatttattcaggatctcctgaggtacagaaccaaaggcccggctctcttccagttgaccatacttaggaactgcatcgctttgggcaaaccgtccacgtagagtatctggatcaccttggatacgataacgagggtctacttcccaagccccggtctgctggttctgagtaaccagtcggttaacctcaggggcagtgttaccacgagtatcatccgagacttctaccaaccagttggctacagcatcttcagcagcttgacggttctggaagtacggagtaatatcattcaggaactcgggggtctgaaccttctctggggatagaccgaatggcatataatttgggatagtaccaacggacatcccaccacggttaacagcctcattccttacgtcatccatcaaagcacggagacgggtagcttctggggtattgacacctgcggatgtatcagcgataatcctatcgatctctttggaagacttaccctcaaagatattatcaagttcggagttccacttacctgcctggagttcctgatcctcaaagatggtcttaccagaggctcgcttaccactcatatcagcacggaaggtctcagagaactcacgagcgataggagaggccttggcgagtggctctaggagcgacgtagcttcgtttcctagggcatcccaggctttcttgaccgtacccctaggctctagctcagacgccttaggaggggccgcaggagcattaggatcaacaatggcagagccagctgaatcctgatgacgacccagggtgtccaaaccagaggatacagcaccaccagcagtacccatagctgtaccagtaaaggcagccgtcaggaggttatccatgaactgctctggggtttgtacctgccctactgcatcataggcgatggtatcctggagggcctgctgggcaccagaggtaacaccttcagccacaccagagactgctgcatgcttaccagcctgggtaacagcctcgatagcggtttgcttaggtagtcccgattggaccaacatctggtaagcgccatctttaccgatgtgcttgaggagtggggcagcgataacaccagcacccgcagtgtctagtaccgagaggccagcaccaccgaggactgcggtccatgggttgctttgatcggggtctagttccttcatctggttactcagggcacctacgttgatacccatggaactcaggaaggaaccaatgagcgctccacccatacgaccaggggccccaaagacagagccagccttagcacctgcggcaccaccagcaagtaccggggccatcgaagggagagcctctacgatattattcttaaggaacgacccgatggatgggatatcttggatatcagcgaaagaccgaacatcaggggttccgtactgtgacgcttcctgagcattctcctcggccatctgtgtgccgtagtctttcaggtagtcactgccagtcagttcaccaagggtagcaatagtaccaccgatgttagactgcatggtatcaaccccacgaccaatcgcagagctaatagaattagggtcagccggagttactagggcactcaggtctggggcaggctcaggggtagcaggggctacttcctggggtgcctcttcgataacctctggctcattcaaggaagccaattcagcggctacgtcgaggcccttgacctcagccagttccgcatcaatagcggccttcagttctggagaaagagccataagtcaccttctagttgctggaaagagaataggctcttaagatgtatcttaggatactaaccttcttagtaagtaagtcaaaaggaagaaggaatcttaagagcctataggtctattatactacattttggatactttgtcaagtaccttttatcgggttggggcaggatagtccagatcagcaccaaaccagttacccgtaggttgaagcttagcagcctcccgctggataatacccactgggttagccccaggattagcccgaagttcatttcggacagtctgggcaatagcctgttgggcagtcttactcagcttcttaccacccagagcctgagaaccattgacttcactcaggataccaagggcgtccttagtagtaacagcttcacctcgggctgccttagctgctgcctgacgtgcctgagcgctaatcctagcggtcttgagtcgtacagcagaacctagctgggcattctcttgggccatgtcctggccacgtcgagtagtttcagcctgtagctgggcccgttggttagccaggtcttggccacgtcgggtcaactccagattagccctatctacagcagcctggttgacccacttatcaaggacgccctcagtcttacgcttggtttgctcaagggtcccttccttaactttcaggttgccctcaccaaggcgtacatcagcagcatccttagccaccttacgctccagatctttttccttgatctgacgatcagcagctgcggcagccatcttctgctggttgatcccagcctgtaggttacgatccagttgacgctcataggaagcagcgaacatatccccagctttaccagtcttgtctatggccgaagccagaagaccagtaccaatgagagcataagatacataacgagacaggtcatcattatccatagtcctcatctgagtcaactcttcgttaacccgattcttaagctcttggggttttagctctacaccctctctctgggcatcagcttcaactacagcctgggccatttcaggacgacttacagcaccagtacgaagaccctcggctgcaccctgttggatgacctgtcgattagcctcctcctcatctgctacagcagcaccagccgcagaggccacctctggagcgatatcaggctcgatagagggttggttaggggttaccccataggacaggagttcagcccccgtagggcctcctgtggcgttctgggctgcacgttggcctacaccctgggcccattggtttgcctcttgagcaacctcgggacccatgttctcaaccgcttggctagcctgagccatttcttctgcacgagtacgctctgcatccccgagttctcctggggttacagcggcttgtacacctacagagataggaccaccgaggatacctgcgatacggcccagggcaccacgacccgtagcctcagccgcaggggccacctcttgggcagcccgagaccaacggtcagggttctctagggcagcctgagcagcccggcggacacgatcagggattcctgagccctctacagccagcggcagtttgttccttgcgattcgcgccatgtccagttcattctgagcagcccggaggatgctagggcgaattggggacccttcataagccatgctggccataggattaacctccaaatagtttacttaggattccagactttggctgctgtccgaaaccgagttcttctgcgctaggaaggattcccactcccgctcccatacctgctgcaacttccgctgcgcctcgttcgcttgctcctctagccccctcgacagaaaagcttggtactgtttctgaagaaggctcacttccttgcccgaggagagccgcgagtgctgctccgcccattgcgccaaaagggtttgattgtccactagactctcccgattgcattgtcccaaggtgggtggggcggtaggaaccttgacggctcaactgtacacgctcctgcccaccacctatattctgtcctatagcgaacagcttctgaggaagggaggccattagaacagaaggcccccgaccctaccaccagcattcataccaacagaagcacccgctgggccaccgaagagagcacccaaggaagcaccaccgagagcacccagggcagacccgaggccaccaccaccgccaccacccgaggaggtagtaacgttggttccacccatgtcgccggagataagctccttgtaggcgagtaggtcgttaaggctgacgttattctcataggcccacttctgtagagccccgttgatctcctgctgctcctgattctgaagcatactaccagcatcaacctgcatggcattaccagagccgagtcccttagcaatagccgagaggttgcccagggtattcaacctattctggttgtaagcctgctggtcttggaaagccaactgggaggcgttattctgttgattctggagcaatctagcggtagcaataccttctgctacacccgctcgggaactcccatactgaccagcattagtggcccctgctcgcaggtctggacgtaccgtagtgtcgaagtcccattgcatctgctcgttggctgcaccaatggcgttcgccaagccagttttgttgggatcgtaaggaccaaggtaatcagccagagagctaacacctgagctacccaggagagactgaagggcactcccgagaccacccaacccttcgattccactaagctggagagcattctggtcagccaccgggtcaaagttcggatcgccaccgtaattggggtcaaagcctccgttatgtagccaatcactggcacccgagagtagttcattatagttaccttgctgatagggtgtagagacagaggtggtcttttgcttcttgctaccacccttgtaagcccgagagtctagggcatcctctacatcgaaccccatcagacgctttacattaaattggaggaagttcatctggagttacctcacgatagaaggatacggagtcttcggtgtacccgagtttctctagggtaggcttccagccccgacgaccttcgcattggataaaccgacagttaactcgttgggcgaactgtccgaggaagtcgtctacctccgagtaatctaccggggtttcattcccaggcatcttaccactccagaagaagtgaaggatattacccaggggtgcttgggacacttggattacaccagcgtagccactctcttcctggtagaagacataggcctcataattaaccaaggagtgaaccaagtgttcgaagtcccaaaacttaccgaggtccgtcctgttgaaggctcgggccagagcagggactacggtaggaagcagatcgatattctcacgagtaattaaatgaatcatggagtcaccaccagggggaatgtgaatgtacccccgaagactgctccttggggaattccttggattagaacacggccattagctgtgatcttaaacattgcttggttaaccaccccagtctgaatagtagccctgttgagaacatcaaagacttgatccaacggaggtgcgttagggtcagacggaggtggataagtaatagtgctctgcgctgggataatgctggaataggccgggataaacaactcagcaggaggccaatacgcctggggaagatccaggacagtagctccattagtgtagttaccaccagacatgagcatggttatccatacttcatccttagcagtgttcatcctataggcacaggtacccatcggctgatggttgttctgtggggtaaataggataaaatcccccggcaggtccttgggtttagtacctgcgagtctccattggttatccaagtcgtaatgatagatgccggatactggacctaccactccgggggcaaaatactttacagtccctggcttgagcttcttagggggctccatagagaccccccagtagccgtcagctaggtcattaagagtctgtccaaccctaacgaattcatcattaaggaagggcagaagttcctcctcttcctgtggtggaatcgaagggctgtacttttgactcatcgcatacctgccttcggggccatttcaatagtgtacccattgaagtaccaatccccctccgaagagaagtcgaacttcaaggctatataccggcccacatgtttagtgtcaatcttatagtcctgaccaatccggtatgggtaagggcctttccatcgaataccagaaccttgtacctgagcgttacccacccagatgttacaagtaccgttaccagtaatgtgtggaatgatggcactcactgtcttcatcattcgatcatccccgagatagatatcggatctctcaagggtactgacgaagttctgtccagagaatgtagagttattaccgaagaggaacaacttcttatcctggaaagacgagaagattatactggactttgctgggttataagagccttcaccccagaccgaagtatcggtatcccaggggttggggtcgtcatcccagaggttagacaccttaggatcgatgatcccgtaggctccactgagaacgttgggaaggtctcggatactccaagtgttttccttccagttccagatgatagccctgtcgcagtgcttacctggctcagacctagtggaagagtagcatacccacatttcagtattcacgtggtctgcaagtacgaaggtccgttgatagttgtcagggttaatatccgagaagaagaacttacggacctgagcatcaataacagactgcttctgcacaccgttgtggacatatacgtcaccgtggcctactacaaagtggttaccatcgaactctattgcacagttgggtccgaggatacctacgtcgttaaacaactgctggaactggaagatgaacaatccaccgatataccgcatggagtatacagagtcttccttgtagatgatgaatgaatcacgaagcttcacaccatccacgatagcaccattggtatcagccaaggtgttctgaccagcatccttagtagggtccgttgggtcccaagatgcaggtacaccaccagcatcagccgaggtactccaccagaccatctgtggcatttctacagagttacttgtagcgtttaagccaaccaggaagttcttaaaagacttaagcctcttaaaagtagtattcgctgggaagttagggagtaccctaaaggttgattctgacggtggaagatgatgaggagggttaaccccatcgttagcaaagattaccccgttgaacgatcctacagaccatctgttagttatactagcagcgtaaggtcctggggatacatcgatgattgtagtcccgtcggctagatacaaccgttgttcagaacacaggagccaataggggatgttattccggatgaaaggaaacatatccaagattggggcctgggctgtatcaaagataggcgtatggcccagagccttctgagccttgccgttcttaaaccggacgttgttcccgaaggaccatttctccagtggcaggtcagcgggggcgatatcggtcacaatccccgtagggttcttgacctcttgtctctctagggccattgtatacctcagttcttaatgatgaagaacacagaacagaacggtgggatattacccaacggcatgttgatctttactgcatggttgtgagtctgaccttgaccagcagggccagtctcaaggttggtattggctgcgttaccagagccacccgtcagagcaccagagtcacccgcagaaccggtgagggtagtagcccctcgggatctccaagtgtgggtgtgcgatgggatttgggctagggtaagggcagtcccttcagtgaacccatcccatacgatgttagcgctaccacctctagtacctacagcctgggaagatccgtcgataccccaggggaatgcaccaatgaggttgggaacagggattccgttagaggtagtccctacaccattacaaagcttccaacctgctgggatctgagccagtgacccagcccacatgataaccatcccaggtttaacatactgggttgtatcagcgactgcgtttagctgggctgccgttacagtgacagcctgagaaatattggggaaggtattcttaatagcactcttaatgagtcgcaggtggtcatccccaaaggacttcagatcagagccggtagggttcgtaggcaccaactggttaatataagttgcgacctcaagacccattcttggcctcctttatctcttctttcatttcttttcgggtgacataccgctccccaaagattgccatagaaatctggagatcgctcaccgcttgggtgagcttctccgtggcctggatgtttctttcaagcagagcctgatgaacattctgaccgacaaccgaggaacctaccgtcactaccgaggatacgaccagggcactgacgatgctgcccaggttatcagttagaagttgcatcctccgtcttctccttaaggttgtcttccaggacttttacgaactcgtcgtcaaccttagagttagtcttctccgccagggccttagcaccagtcacgatggacttagcgattaccttggttgggaagagggtagccagaaggttgattgcgagggtttttagaaagataggcatctgaagctccttaacgttcaatgtctttgatcgccagtcgagtgctagcgaagtcagcggcattctcctcgttctggagttccataacagcccgttcgagtttctgaccccagaactgggaccgagcttcatccatggtgtacagataaatctgctcaaggacaccatagagataaatctgcggatacttcgtcagagcccaagtcgttgggttagcgaggcttagctctgggagtacagtccagtagttcacaatgaacggggcaccgtcaggaacaacggggaatactcgccagaagttacccaaccgagtgtagtaggttacaccctgaggttggtagttgtagttaacatagtgggtgaagatatcttgggtgatgtactgaagagtacgcccaccgataagagagtcacccgtgatagaccttagagcaacaaagtgctcagggatctcaatgccaccaccgaaggccatgagagtttcgaagtgttcgttctccctcactcgtagcaatcggttaagacggtcagtagtgttcccaatgaacaacatcagaagttcttgggtaagatcctgacggtcagaccactggatagcggcaatagcgagatcagttacgttgttgatcgtagccattcattacacccgtgcctcagaggtccgcatccgatagttatctcggtcattaagccaacgggtaaatcttgcggcatgatctgggtcacaaccaatcagattaagatcgatgggaccaccttcagccatgggacgattccgtagtgcctctacgacaaccagggggatacttgctaccttgcgcatattatccttgcggttgctattgacacccgagtggcgctcttcggcgttagcggacaggattgactcaacatcttgagtatcctttcggataaagagcccaaggtcttcgtcaattgcataagtcgattggatactcatgatgtacctcctaaggggaaacaaagggccccgaagggccccgttgggttagacctgggctacaacgtcgcggatcagagcaccggacttctcgttgtttacacgcagggtgtactcaaccagcagctggcgcttctcgctgtcaccggtcttagccagttcatgctggaagaacggacgcaggtagcagagggcgtgcatcttcggatcaaagatgaacatggtgttttcgtggaaccagcggttggcacgaatggtgtacttaccgaagtcactctcgtagacgtccacggtctgcgcgatgcggttgtccgaggcatccagggtgatttcagttgcacgacccttcatgttcttgctgatggccttcttgatcgagctcgaagtctggatcgagttagcctgaccaccgttgcgccagatagcctcagaggcattcaggagcatgtcttcggtcagaagacggaggtcaccagcggtaccagtgtcggaaccatcaccagttggcagggtaccattagcacctaccgaaccgttggtcttgtagtaggcaaagatgtttgccatctgacccggagtagtggtgttacgctggatcttagcctgaggggcaccgaccatggcgtattccatgtccagcttcagttccttcgacttcttagccagctgatacgccagttcgttcttacgaccagccttcttgaccttatctgcggtaccggtgacttgcagggtctcgtccgagatttggcagtagttgttcaacatggtggtgaagctaccagccttgatggttgcatcctcaccttcaactcgggtgttcttacccggctggcggagttcatcagtctgccactcgtgggtgatagcggtagctacgcccttgccgatagcagtcatgaacggggtgtcatagggtgcgatgttgtagatgatatcgataaggtcttcgcgcttaccgttgatctctacagtcgagacggcattagttggagttgccataagttacgtttccttctattagaaaatatcgagagaggagaagagagcagcagcggcttcaaccgactggtctttcctcagattagcgcgggcagctttaacccgcttagaaccctctgaggcttccgccctacgagcagcaggtttaactgcggcaggtagttcagtctcctccttcttctctagggcagccttgcgacggacctgagattcagcccacttacgtgctgcatcgagtacagccagttggcgggcatcagatatccctcggatctcatcctcggagtatccaatcgatttgccgtaggacacaatcttgtcaccccaagactcatccgtagtcatttccgggataagtttcttggctagctctgtctgacgcttaacgtaggcagagtggacaatctcggctcgcttctcttgcatagccttaatgtcgttacgacgtttgataagagcctgggctcggtctcgggcttccagggcttccagtcgaagggtttgatacttctctggatcctgggccttaagctgctcccagtttacattgtcatactgattagcaccagcaatagcggtaacagcgtactgctcaagctcggccagtagattagagcgttcagcatcaagctcttcgaatttagccgcatactgatcctctagttcagcctgtcgagttacaaactcttcattgcgaaggtagccactcttaagctcttcgaagttaacctcgtagacttcatccccaatcgggatctcgaagagtttatcctcaggatcttcctcggactcaacctcgggatcttcctcagaaccctcttcttcctcctcggactcaacctcttcggtgtcctctggagtaccttcgtctactacctcttcctcctcttcttcccctacgactttaccatccacggtttcatcaccgggtgccaggaggtcatcacctagcaaatctccgaaggcttccgctgcctcgaattcatccatgccttgattctcaaggtccattacttatactcctttagagtgatcgaatccaggatagcctgaatacgaagttgtacgcggttgagggcatgtagttcgtggtagatggcctccctggattctgaatccttaggtgccgtggacttccactctccctcgatctcttcttggacaatacggaaaagctcaggaagaacgttctcacgtaccatctgttgtgccgcatcagtcagcactagactatagccaaaacgttctcccaagattatttcctcactgccttagatggcttcttagtctcaggtactttaccgtctccgatataagcagcccgagcctgagtagcctcaagatgatactccgcttcgttacgagcccgttcccaagtgaaacgatcacgctcaagttgtagttccgcttccttaagggccatttctctctgctgaaggacagcctcttgcttcttcagttcgatctcggccagtcggatctgagcctctacctgcttcatctgggcctccgcttgcttagccaaggcgtccgattgggcacgttgggcatcagcttgggctttgatatcttcaggcttaggttgtgcttccttctgctctctgatggccttagcccgttgagcttcaggagaatccgggttagtccagaagcgatccgggtctttgtacccagcgttctctgtgacttccttaaggatattgtaaaggttctgctcagagactaggacccccagaccaccacccccgactacagcctgggccatttcccagatacgcatcaggtggagcatctgctggtctttgttcatgttaccaataccaacggtaaccgtcaggtcggatctttctcgccagttggcagggttaatagcaacccacttgcctcgtagctggaagacctcttcctggttctggtacttaatggcatggtcatgcagaagttggaacaaacgtttaacaccagtctctgcgaacatccgtgcaatcaggtcaatctgttgctcagccgcagtcatcaactggttcacactcatagccgcttggttagagtgtagggtattttgatctagacctcgggtacggtcagtgatacctgtccgcttacccctgtctgcctcaagtcgatccagcataccatagacttccccagacaactgaggggtctccagaggcatgatagagttcatggccttaacccgaacgatacccgctgcctcattagtcagcaagtcttcgaggttaacctgaccatccaagactacagatcgaccttggttagtccggtagatgttgtccatgatgttgcgcatgagtaccgaacggatctcttgaatgtctcggatcttatcgtagacactcatcccgtggaacttatgggcaattcgataggcattcagatcagcgaaaggacggcaatcccaaggctcgttgctgatgatatagtcgcctacatacagaatacggcgaagctcagagataccatccccatctacgtccagaagggtatagcactcagaggcccatacctcacgattagcctcggcatcatccccagagttatactggagttgacccgtcatatcgaagttgtcacgtaccaacctttctggctgactatcagagaactcatactcgtcgtatggtagctcatcgagtacatcttcgggaacacccaggagccgcaggtcacttacggtatacttctcacggtgacataggaagcgtgcatcatcaatgcaggtagccaaccgatcaaccaggaagttctcaggcttgatgcaggtgactttaatctctcgcttcttcttatccttgcgaatcttaatgctgtaggttccatcctcgtccacactctgggctagaatctcagtgtctggatcagctaggatatccgctaccatttcctcagagagaccagagaaccgttcgaaggtggggttcaggacctcttccacgtagacctttacaaccccggtcttcatcatcagagtgtcttggaaccagtcgaacattaccttgaacccctcgttcttacgcatgaagaggtagttcacatactcagtctcttgctctgcctgttcaacatcttcggcagtctgaggttcatacttaactacttgaccgcctgacgtgaataccttcataagagaaggcataatccagtctacagtctcttgaacgtccctagatacaatcgcggacttcccaggtcgctcgttaccgaagggctctccaaagtaatacttcagggcctcagaacgctgcttggaaagctccgaagagttgaaatcaagggcgtcgttaacaagttggtctagatgacgaagtacctgttcatcatccataggcttaatcttgcgacgacgcttagccattagacaatactcccaaaccaatcaggggtcaactttgcagtatcactcctgtagtatccactgtttcgtacagcaccaggacgtgcataccgggaagccatcaacagggcataccgggtagcggagatcatatcgtcgtttctgtcgataatctttccgtcctttcggtggtacattttcatttcttttaggaagttcgtacacgtattaaacaccttcagatcaccattctccatacgggtcaacatccagttaacgccgaactctacagagttacctccgtgtttaccatcaggacccggtgggttactgaagggctcatacactacattgaggttgtggtcatctttaagaaggtctacgaatctacgaccagaggttgctccatcgtgcttaaaggcatcatggggaacaactaccgggatctggtgaccacccttcaggtagatagcatcagcgtgcatcccaagggtctcaccactctcactcctctcatcatagaggtagtatttgtctttctcagggtcccaggccacacaggcgatagcgttagggtggtcaaacccaaggtcgataccgatgatcctatggaagtgatcggggatctggaaaggctcacatacaaacttctcttccagaatggggaagactacaccagatccgagcatagggacaccctcggccctcatcctgcgttctgctggagagtatacagagagtagctgctctttaacttctggactgaggtgtggggcgtcttcccagcttgcatggacaaggaactgaccaggtttaagatcctgtaggaagtccttgacgatctccgtgagaccatgctctggggtaaacgtcagatatacaatacccccagtagtagccgttcgggttacacactgggtataaatatctttggggcattcctcatcgagccagatgacgtcgatggcagtacccatgaatttgtcctgggacatttcgtaggacttgaagatgagggacgagaggcccccggaggtatgcttaacaactactgcttgcacacatccgggtttaccttccctacgaatcgtctctacgatatcttccttggggatcatccccgttccgaaagcctcagggttcttccagtctcctaggagttcggactggagaatatcccgagtggtatccgtggagatccccgccgcccagcagttaactggacgatcatattttctaccagtccaccactcagggtatcgaccggttaggtggcaggccatgataaaggccccggtgtaggttttaccacagcggttaccagtcatagccagtagctgggcgcagttcgaggaagctgcgataaacttctcttgccacccataaggagtgtactggttcatgcggaagtatttctgccgctcagccaactccctgactagattccgtagccgctcttgggtatccattagaccaccttgtcacctactgttgatgcacgccacagggcccgttggaggtcccttacgcgcactggagtttgtttagcccagaggctatcctctgcctcccatgcagcttcatcaaaccttccggatttcagaagattccacgtcttggggaacttcttcgtccacgctgtacccagctggaagttgacgctaactagggcatcgaatagctctggagtgcaaaaaggcagctgagatacttgcccttgggctgcatcataggctgccttactatcgttctctagccaagtctctgctcgggctagggtaatcggtccgtcttccccagggagttgcaagtgaccataacctccggtcattttcccaagggagtctttgtaccactttagaaccaacccctctcttcgcttgattagatcaaggtacttaagaggttgggaaagaaatgactttagccaactctggctcttcgtcgagaattcgtcgaacttcactgattagatcctctgcggacatatcttccacattcttagtagtaagctccagtttctgcttagctccgaagcctccacggtccaggatatcctgggccgccttgaggcgaatcccacctttctcttctgggttgctagcgatctctacaaccacacgaagcgccatggggacatgactcccgatgcgctcagagataaaggcgttgatgtattcggcatgctttcgatggtatgcagctacgttgcgttgcgcatgattaggagagaacccagcggctatatatgcttgagttttgttcataccatctgccagagcctcacaatagaggtctagcttttctttagcagaaagaggagcagccccaatcgagacaaccttttcgtctgacatacactgctccgatctctctaaatggtcaccccggtaggactcgaacctacgacctcctgtgtccaagacaggcactctaaccaactgagctacgaggagttaatggtggtcgaaggaaggaattgaacctctagccaatggcgtccgggttacagccggatggtagtagccatctacctctacaacgacctctgttggctgggacggcagggctcgaacctgcgacctgagagttaacagctccctgctctaccaactgagctacatcccaatgaaatcttaaggtaatttctcaaccttataatactattatatcacactttttctattttgtcaagtcttttttcttcttttttttattttagtcgcaaggcccggttttgttagggtttttgctggaatggggaaggggttcttaagactatcttaagataaccttaaggtaactaaccttcttagtaagtaagtcaaaaggaagaaggaatcttaagagcctataggtctattatactacattttcgataccttgtcaagtactttttgatatttctttgataatcacatgatttacccgacgaacggtatgatagggttctataggtataccctaagactacccttcgtaggttgctggtaaggggtaagtggcatagggttcccttgatccaggttctataggtactccctgaggttgttccataggtatacccctagactacctctgtttgctatgtcctggcctattgcccctttatccagtaatataccaacaggtatcgggggttgcctttgatccagggcctataaccgggggtaccccaaaagtctattttatcctccggtgtatctggggaatatccccccaggagtcccccagataaagtgggggtggcctatccccagggctatagcccctagggcctccccaggataccataaggctagtccggggatcaaccccttgagctaccgttcatcggattagtccaagggtattcataagaaaaatcttagggtattcagggggtggatcggggggatatccattgataaccccttgatcccctattgactaatccgggggctctatgttagtcaaagactgttcatatccgggggtttgctgggggactactagcctacaggctgtataaaaaaccagtagacaaccccgtaaagaatatggcgtaatggcgccgcctttagggaaaccgataggcaacgggggaaaccccaggggcttgacaaaccccgcggaaccgggtctaatggcccccacgttctacctaggccaccatcccccttgccgcagtgctatccgggggctgccaactcaggaagagcgcccaagtcacccaagtgtaaggccggcaggcatcgggggttgacaaggggtaggggaagcggtatagttcgccccacgtcaacggcataacgtgcatgactccctagggattagcgtagccttgacaagcaagactgatggccgctcagcaaaagagcctatgccagagaactggacgaactaacccccgtcaaggggttgacaagccaagcccaaggctctaacatgggcacccatcaggtgacggccacctggggaaagtgtaccttcgacggtccttggactgaacaggggagaaacccgaaagctgagggaatagcgcatactccgattagagcgctggctttgatggtcgctgccttatgacccatccgactggttgcctgctccagcgtaaacaattagcagagtccatggtggaatcgtgatggacagtatgttgggttagtatcaatggcttagcgcagagggcgaagcttggtagatactggcgaaggtagggacgagtagacacgaagactcccaaggatagccagaggacagaccataacagcgatactaacgcggaaaggggccggctacgccaatgccaaggtttgccgactaacccctttatcgtatcgggatgcgtgtcccggctgatgattccaaaaggatgaaacgatgaacgctgctatcgataagaagctgcgccgcaaggctagtcgcaaggctcgtgcccaaggtctgaacattgggcaccttggcaaagctcagcagcgggcagaacagaagttcgggatcatttctaattgtaacaaaatcctggacagtaagtatgtttcacttcaggaaaaggctggagcacgcaagcgaaaggctctgatgaataccgattggcgtaatcgcgaggatactaagctgcgcaattggtacaagcctagcaagtgcaagaactcccccgtcacccacatcaaacccgaggtataagttatgagcgactacaagcgtatcaacggcatcatcaaaaccattgccaaccggggtgctgccctggacaagctggttcaaactaccggcctggacattctcaagcacatcgacgagcatggcgaggtgtccttggcctgcaagctgttcaacgcgatgccgcaaggctccagacggctggccctggcacactggttcgtagacaacggcaagatcgcggccaataccgacaaggaaaaggccaaggaattcccgttcgtcttcgccaaggacaaggttactcgactggagcgtgcagccgagaaaccctggttcaagtacaagaaagagcgtgacgtggccgacgagttctccctcgacgcggccatcgccgccttcaaggccaaggtacagcgcgccatcgacaagggccagctccaggcagcggatgagcgtatcgctatcatccaacgactggaagtcaaggacgaagcgaaggcagcgtaacggcggatgcgcctggggtgtgtactatgacgcgccccaggtctatccctagagtgcatggtaggtccgtgcattgtagcgatagaccatcaggaggtttccgtgggttactgtatctttgggcaggtccataccatccaaggccaggattatgtttctggtttctgcgatgcaagggtaggtttcgacgctggtattgtgtaccgctggacattcaaggacggtaagtttgcttgtggtgtctacactctggacggcatccgtctgagcatctgcgggtggatcaaatgaagtcaccctacgaagcggcccatgaacgtgcccaaatgattaatcgtctcaagaaactcactaggatgatccgggtgcatcccgatccccggtggattgttgagcgccaggaactcataaggaaacttagcaaatgaccatcgctatcatcgtatccagcatcggcatcgcatacttcttcttccgtgactggaaggaagagatgggtatcaactgacccaactgatgaggccatggtgattcctggccgaaacccccaccgaacctatggttgcaggctggggcgtcttgggaaatcaacaaaggaaactatcccgtgaaacgcaacgactatcgtaaggtcagccgcaacatgcaagccatcgaggctatcgaccgcaagattgctaaggtaactcgtgagttgaccaactccagcggcaatcaccttggtaaaaccctggagttgaacaagctccgtgccaagcgggcatccttggttaagaacagggcgcggtaatggcatggaagtatattgcatgtgccgccatacgctcacgttccaatgggttgttgctggtagcgtgggtggttctcttcgtcctgtcctcgaccttggacagcaccccttttgcatcgtgaggtagttgaggtgaggaccactaaagaattcaactgctacatggcgatagccacgatgataacgctcgggtttatgacatggttagtttatagccttctcaggagctgatggcaatggatatcaaaatctggccccgcaacggcgtaaccctcaacaacctggtcaaatcccaaacattcctcatcggtggggatgtgtacatggtctgcgaactccgcagcattaagatgaagggcgaatccgacgaggttcccgttctcaatctcaagactggcaacgtcatctacatgcctccggtgagcctggtatacccagtaactgccgagctgaattgctacgaggtgtaacatgaaactccaatacaatatgctcaccagtaagatccgggttgcctcttgggatgatctggagtcgggtcgtctgtacatccgccaggacgaggacggggctgcaaacccgcgtgtctttatgtacatggaagttgcagatgaattcttcatcgtggatatcttcggtgggcccgtgggtgccgtatacttcagcggcgatgttgactgcgggttctaccccgtgaccatcaaggctgcgtccatcgaagtccatcggttcggccctccggcctagggtgtgtactatgacgcccgccctgtatctattcctctggttggaatccttggtcagcatccgcaggttccagcctaaccccaaggcgtaccctggttggtacgtgacccacatccgtgtatctatcttcggcaaacgtgtaggtatcgtctatgaaatccactgaaccacaagtctattggttggccagtcccgatggtgaattccacctgaaggtcatcaacttcggccagttcatcaccgaaaccctttacgaactcggcattccggtggaccacaaggttcatcgggtccactgaggtgacccatgacaaacactaccttcactgtagcagcgtcccgcccccggaacgaccttcacatcagtaagcgggcggatggggtttatgtgaaccctaaaaactctggcgatattgtcttcctcaaggaaggtaataaggttgtcgtcctcagccagagcgggttcagcatcctcgaagcccagaccatgcccaacatcggggagctctacccggctaaggaggtccatgtatccgccaaggtgtggggaccgtatgaagagtaaaccaatgatcggccaaatcatggcccaggagcggcgaatgaagcgtcgagtagagaaacgagggttcaacatgacccatcaggaagtcacccaggagccccgtggtgagcttggtttcaccttggctgccgtaggtatggagtcgagccgatcggcttacctgcgccacgccagggaggccatgatccaatctggtgagccttgccctcattgtatgccagtcttcggtcccaaagagggccgttgttgcaactgttcgagggactggtgatggatctcggcaacttttggtgcctattgggtgtccatcggtacaaaatacttgatggtggaccctacgagattcgccacaagggtcggttagtggaactctgccactattacgacctgaggtgcgatcgctgtggtgacgtacatcgtaaggtggtccgtagcaaatgagtatgtacctcctaataatcccagcgatcctggcctacatgtcggtagcccttttgatatccggggtttccgcactctttttagccgaccagaatggaatgatgggccagagagaccgggacattgcaatcgtgatgggtgccctgtggcctgcatcgcttccctggatgtgcttcatggctgttatctacaacccgctggttattctcatcggatcaaccaagcgactaatcaaaggagattactaatgcaacgcaacgacttcccctcctgctgcaccgccaagatttacattggcatgggcccctcgggtactgctgaccactacgcaggcattgcgtccaatgggttcagcccccgtggtttcgccaaggaattgatcggggtcatccgtcgagagtacaacgaaggtcatggcaccgccgtgttctccgtgaacaacgagcaggtggtagccgataccatcctccgccgcatgggcagccactacaacccctgggcctccagcgccaaccactcgacgaaggttcgggttcacgtcatcaacgtgcaagctgcggcggagatcctcatcaaccacggtgtcctcatccgccgactcggtggtttgcaggacttccccggtactgtcgagcactcggaatacctcgacaagctctgtaaaggtctgtaacatctaggccttgacattctgctgaaagtgtggtataataaccttaaggtgtccggggttgctttatatccctaggatacctaaggttctaaccttctatcttcttcatcttaagaaagaggtgagaacaatggtcctcaagctctacactcgggtaatgcttctggctatccccgcatgggtaagcatcctctgggtagtaccccagatgctgtcccccgctaacaccatggttaacgccatcggtgccggcctcctggtcctttccatcctgtactccctctgggctgtcagccatctgtactcctacgccggtaagctcactggcaagaagggggtgtagtatggccactgtaacaagaagtagtaaggggccaaggatccctctttacttcgaacgtaagcgcgattctcagatctatcttcgttcggaatcctggaaggacctcaccatcccgatggtaaacatctgcaatgggagtgtcctgtacatacaccctcgggaaccccccgtgtatttcgtggcgatacccgagggtgaaactctcaaggtgaaggtgtgatgtactatgacggaacagcagcgaggcctcctccgtaaggcaatccacatggatctggagggtatcggcgaagatacctctgacctctacgacaacatacataagatagacggcctgctgggccacccaggtaagcccccgcatgattggggcttctatgtactgatgttcgtcatgttcattgccttgtgcatggtctacatcacccctcttctctacaagtaaggaatccctatgaagaaaatcctcggcctcctggccattgctgctctcgcaatcaccgcaggttgctccaaggttcccgctggctataccggagtcgtcgtcaacatgatgggcgactccaaaggcgtcgatctgaaggaaaccccggtcggctggaagttcctgactcccaacgaagaactgttcaagttccccaccttcaaccagaacttcgatctggcggtggtgactgcccaggacaaggacggcctgaagctggacttccccatcggcgtcaccctccgggctgctccgggtagcgcacccctgctgttccagacctaccgcaagggcatgaacgagatcgtgagcgtgaacgtaccgcaggtggtccgtaacgccgtgaacaacgccagcagcaagaagtccgccgaggccatctatggtccgggcaaggaagccttcgtgaaggaagtcgaagctgccgtccgtgagcacttctccacccgtggcatcatcgtcgaaagcctgtacctcaacggtatgatcggcctcccggcccaggtggtcgaggcaatcaacgccaagatcaaggctacccagacggcgatgcagcgtgagaacgaactgcgtcagacccaagccgaggcagccaaggctatcgcggcagccgagggcgagaagcaagcggctatcctggtggctcaaggtaaggccgaaagcctccgcatccagggtgaagccctccgccagaaccccggcgtggtagaactgaatgccatcgagaagtgggacggcaagctgcctacctacgttaccggcggccaagccatgcccttcatcaacgttcgctaaggaggtgaacaatgggtaagcgtaaggttttctatgagcgtctctgctccaacggtgaattgaccctgaacggcaacctcaaggccaccaaggtgtcggcaccgaccaaaggcaagcaacagcgccgtggcaccttctaagtaacttagaggtcgctagtaatacccctagtattcctgtcctgggggtattgctggctaactcaaccaaggagaaatcaaatggcccgtatcaagtatgccttcggtatgaaacccaagaagggcgagggtaaagccctcaaggtaatgacctcttcctcctgcttcggtaccatggaaggtccggtaacctacggctataagctcgacggttggaccttcatctgctcccgccgaagcaagaggttcatcgatgtactcaacaagtgtacccaaggtgaactcaagaccatcaccatcggcggcaaggccttcaagatcccgaaggttcacttctggtcttacgaaagcaaggccaaggattcccccttcgagaagtattctaacgggacggaaatgatttcccccacccatcacggaaaggaaggtgtctgcggtatctacttcaaccccaaggtacacaccctggattcctggtaccccatcatgaagttcctcttcaagctggtatccagtggtctcgaccctcaaggtcgtgaagaaaagattcacatggagcttgctgagaagtatggcttctggaagtcttacctagcaatgtcctttcacgggctgatagccaatggctacaccgggtatcccctcaccaactacatgttcagtagtgattgggaggatatcaagaagggcgatatccatatccagtccgccgaagagtgcaaccgattcggccgttgggtggccaaccgtaatgccccaggtggacgtgagtgggtaaggtccaagccctacaagtcagaacacctggggattaagctgaacaaggtggaggtggtaactatttacccccagccaaccatcttcggcaagaaaaccccctacgacaccgtggatacagagttgggaggattcctccggcttactccttctgactgtgaaaaacacggggtggtactgctggggatcatgggtgaaattacctggtctctcggctcaagggatatccccctggccctcgaaggcttcatcgagaaaaacttctgacaaccaaggagaaatcaaatgggaatgtatgcagcccataatgtgtactataacgccgaagggtctgtggtacaccactactcggtcaagatgatggccgaacatacaaactgcttcgggtcctattgcgaccagacctccgccgttgggggcgaccggtgggttaccgggattggccacctgttggtgtctacccacgagaatacctctggtaaactggtggagttcctgaacagtgatctggtcaacaggattaccgacggtggtattctctcggcttccatcgactggcctactcgttggtgggattacactggtgatctcaagaatctcagtgatcccgaccacttctctcccccaggacgccggcaggcagtctatgtacgggtggacctcaggaagaacgcatcggccatcatttgtgccctccgaatgggcgatcgtctgtgggcaataggtgacgcattgcgtcgctatacccaggaaaaccgtgataaggtcctgggatgcaatgcagagatcctcaccctcgcggcttgtgcccaggtaggaagcactgctcactgcgacagctatcctgccatgttcccggtgactgccggtgaataccgggaaggatgcgaaagtcacggatgggaggtggacgacagctacataagcgaggtcatggatggtatcgtaggtgggtacaaggagatcacctacttcgatatcaagagcatccatggtcggactcgcgaagagttcaaggacaagctcaagcatcacaacgctgagttgtggcaagggtataccaaggacgattgcttgatcgaatacgacgggctagaaggtgtacctaatgaccgaatcctgtccatcatggccccaatcaccattgacgtaggtgacccaggtcgggaaaggtccgaggtcgtacccaccagccaatacagcatccccgaaatcctcgaaaaactggagaacatgcaatgaacaacgcaatccccctgatcggtgcagatcccgaagttttcgtcggctacgaccgtaatccccagagcgtcatcggcttcatcggtggaaccaaggaagaacccttggctgtagccggtggtgctgtccaggaagacaacgttcttctggagtacaacatcgacccggccagtaccaaggaagagttcgtggagcgtatcgtctccgttcgactccttggtgcccagatgctccaccccttcggcatgaacatcatcgagaacctgtcgtctcacctgtacgacgaggaactcctccgcagcttcggtccccaggcttacgtcttcggttgcgagccggactacaactgctggacccgtcgccagaacgtgatgccgaacgatgctcctccgaccctgcgaactgctggcggccacgtccatatcggcttcagccacatcgagcgagtcaccaaggctaccacccgagaagtcatgcagatgtgtgactacctcctgggcctagcctctgtcatcctcgatggtgacacccagcgtaagaagctgtacggcaaggctggtgcaatgcgctataagccctacggcggcgagtaccgtagcctgtcgaacttctggatcttctctgtagacctgaccgagtgggtctatgaaatggcagtacaggcttacacctccaagcacctcctggaggagtacaagtccatcgtatctggcgatgaagtccagcgaatcatcaacgataacgacggcgctgcggcggtagctgcacttcaagcgctgggggtgaagtatgaatgacctgaataatcgccatcggttggccggggacttcaacatgtactactcctccacctatgccttcttccgggttgacggcgagcctcgggtagtgtacgtggacgataccgagtccattggtgacgaccgtcaattcgacgggtttcgtctcctgggtaatgtgtatcgccctgacggcagtaactactacggtggggttgtctacagcgaggtagaaagcgtgcggccctccagtgggtactatgacgtctttggccgtggggttcgtgatacttatgtatccttcctcgtgaacaatcggactcagcgtaagggtgtggaccccaggaacatcctgctgaaccatgctcaacaggccatcactggcgaaatgatgatccgaatcttcacccaggccgaggaaatgatctctgccccatcccaccgggacttcttcatcaaggatggggtagttcactggaagggggtgaaggttggtcagatggtagatggccgactgtccgcagatgaacaattcaagaaccaggaggacttgctatgtcagttattggcacacagatagggttccgtaagaaccagatcattgccccggaacatcacgaggaactgcctgcggttgcttccttcgggttcgaagtcgaactggaaggcctcaacaactggccggaagtggacgggtgggatctgaagggtgacggctctctgcgggatggtatggagtatgtcttctccggtcccgcctctggccagaaggcaatcactcgggttgaatcctttgtgagtgcgatggaggaaactcctccggcccccaccttccgttgctccacccacctgcacatggatatgcgggacgtagagtggccggtttatgaacgaacggtcctgacctacatggcattcgaggatgttttcttcgatcactgccagccgtatcgtcgggatagtaacttctgcatcccgttcttcagcaacgactggctggcccagaccttcggtcgccgtatcctggccccggaaggtgaccgagagaaagtcttgggtcttacctcctggccaaagtattcggccttgaacctccaggtaacccacaacttcgggtccatcgagttccgtggggcccatgctctcactactcggcaggaaatggtaggcctgatgcagcgtatgttgtgtctcaaggccttcgccatggctcacgcagaaaccccgctggaagagttcctcaaggtgctctccgaggtgaatctccgtgatgtattcttccttggggtatctccggactatgaaatgtctccgggtggtcgtgaaatggggatcgccagtgctactctcgcggtagcaaccatgggctttgttcgatccggggtagaccccctggaggatgaacagaaccgtcagcgtcgtctccgggagcaggaacgtgagcgccagcgggccttggatcgtaggctgctctttgctcgcgctattacctcacgactactagatggtgcagcagagcggtacaacttggcaatggtgccaggtacccaggttcgactggatacagcgatcactgcggtaacctctctgcgtcgtattggtcaccaagtgcgtgtacgagaccttctggaggaccaagaggttcttcaagatgccttcgtactgctcatggataacccgcagcaccttcagcgccataccggcgtaacaatcgaaccagatatgtactaaggagaaatacaatgtgtggattggtaggcttctgtgccacaactaacgcgagtgataacgaaatcgctcttctcaaatccctcctggccgtggatattatccgtggtgctcacgccaccggtttggccaagatcgacccggttaagaacgaggtaggaattcacaagcgggcagtagatgcctacgacttcctggctgatcctgaaaccaaggagttcctggacaagggtcgggctcgcatctacctgggtcacaaccgttacgccacgatgggcgacaagacggaccatgggaatgcccaccccttccaggtagaccacatcaccatggtacataacggtactgtagatacctggggcctgcacctgctggatggcaatgataagtacaacgtggattcgaacatgctgtgcgctaccattgccaaccacggtgccaagaagacgttcgaggagaagttctctggtgctgctgcggttgtctggtgggactccaaggaacgtagcctgaacttcatccgtaacgaggatcgtcctctgttcatggcggttaccaccaccgggaccatcgtatgggcatcggagcctgggatgctcaaggttttcctggagcgacccaacgctaagatccgcctgcgttctcccatcgctgaactgaaggctgaagtcctggtaactatcccgttcacggaggccggagtgcgaaagggtgcagaaccccagaccactccggttacatttctcgaccttcccatccccgaaagcgaaaggcaagcagcggcatggtggagtcgctacgtcggtgtctcggactacgatgactacagccgaagccaaggcagccaagcgggaacgaaaggcagccaagcgggctcgtcgtatggaacgtctggcgatgcgtacgcaaggaacaccctccggatcaacaacaacctcgacgcagcaggtagcaccttcaagcaccggcaactcgtcacctttgatgttgtcaagatcgaagcctacgcaaacggaagcgagtacggaactgtcactggaatcgagcgtgaagaaaaccttctcatcgaagctcatggcatcaacgtctccaaagtccacggatacaccgtcctccgaggtagtatctccaatgcctacttcatcggccaagaccgtgatctcaaggttactgtcgaggatctggcggtaagctgcctggacccaaagcatcggccgactcctggggagactaccccggttttgaggattgggacgatctcctcggagacgaaatcccattctaaacccagggttcaagtcggcggcacctcggggaatacccctccggccaacatcagctaccccttgaaggttcagggacacacgttcaacaacgtacatgtctttcgggacttcgtatcccaggggtgtgcatcctgcgggaagattccaaccgcatatgaccagcgtaatcgtcatctgacggtatacgaaggtgccaagttcactggtagcctggatgagtgtgagttcatctgtggcgagtgtgtaatcgaaaataaataggaggtcaaaatgacccaagtaacgatgaagcgtcaagtagtgatccagatggagaccgacgcaacccgaaagtatcctttctcccgtgacaccctggacaagatccagtcgattcgtcgagtcaaggagcaggaactcaatgatgccaacccggacgaggaattcctggtaccggccccggtagtcattgcggaagctatcgaccgactcttcgaagactacttcgagtaaggtagtgcgttagtaataacccctggccgacccatgccggttcctaagatgtgtacatgggatctgacttaggaattcaggggttattgctggcttcactactaccctcaacagaaacaggagatatgccatgttctacatctacaaaggttcccgagcttcttccggtgccgtaaatcttcgcaatgcccttggtgcccgaatccttcggtccgaggggtctacctaccgtggccgtgcgggtactgcggtaatcaactggggtaccgtaggtgcagaggctcaccgactccgggatattgcccctgtgttcctcaacgacccggcagttgtttatcgctgcgctaacaagctggagttcttccgccacttcgaggccaatgcccctcacttgattccccgttggaccgagcgctgggaagatgccttgggtgtactcaatatctctggtcgcatgtatgcacgtaccgatctgaacggccatagcggtcgtggtatccatctggtgtgtactgtcaatgatgcagaagttgctgcaatcgatgccctccgtagacagggccactacccggtacacatctacggtcacacccacatcccggatgttatcaccagggcacaactgttcacccagggaatcgtcggtaagcgtaccgagtttcgagcccatgtgatccgtggggaagtagtacttctccaagtcaagctccgccgtgttgccaatgaaatggtgaccaacgaaggacaaagcatcgttcgtaacgtagctggcggctgggtctacggggttaacgatgcaatggaccgtgatggtgctgagcaggctatgtcggcggcggcagaagcaatccaggtggctggactggacttcggtgcagtagatatcatcttccagcacgccactggccgggcctttgtcctggagatcaacaccgccccaggtctggacgctgaaggcagcgccctggaggcatacgtcaagggcttcaacaaaatcttcgaggagactatctaatggctgttcgtgttttcgtttatggtactctcctgtctggtttgtacaaccactaccttctggaaggggccgagtttgtcggcaatgctgtatcctgcgagcggggtctgatgtactccgctggcggcttccccatcctctccttcgcctcccgcgctgatctcattgtaggggaaatctggcaactccccgaaggtgagaagggggaggaaatgctggagaacttggatgccctggagggttatcctggttggtatgatcgtaccctcaaggatttccgaatcaatggggaacgaatcaaagccctggtgtaccatcaggatagccacatggcgttggatatcgtccaagatggcgactggaaggcacacctggcaaaacgacaaggagcagtataatgaatgaaatgaccgtagacaaagcagtagaagtctaccgcgataccccgaacaccttcggacaccaagagctacatgcccagaagatgctcctcaaggagatcctgggccttgtcgcctcccaacgacacctccaagattccatcgaggtctccaagatcccggaggcctcggatagtcccgagaccagctatggtgggtactgtgacgagtctgttggtattcgcttcatgtgggagcgactgaagaagatcgaggatcgactccgtgaactggagaaggtctacggtactttcgtaacaactccttacaagaccctgccgggtaacgtcaatgctgtaccgagcttggtactcaagagccagatggaggaataagtgaagcagatcatcggtgatacggcttgtccgggttgccgagctaaaggtggggataaaacaggtaatcacctcatcttgttcgtagacaaggagaaaggtacccgcttcggtagttgtaaccgttgcggccactatgaagttctcgaagaagggttcaaggttcctgaacgaagggagaaatccgaagaggatatcatccatgaagtcaacgaagtccttgagtatccaactaaagccctcgatactcggaagatcagcaaatcaatcgctgaacgatacggggtacgtgttggtctatcacaagaaaatggtgaggacgttatcgagcattactatccacgcacccgcgatggggagtaccgagcgtttaacgtccgaatcctagaccccaaggctttctactatcgtggtagccccaagggtggtgttgaccccttcggttataacacccttcggcataaggatatgggccacctgcggttagtcatctgcgaggatgaactgtcggcaatgtctgtggctcagatcatggagtcgaagctgcccgagaagtggaagcatctgcgtcaggcagccattagctggtcctctggtgttggttccgctggacgagatatcgcattcctaaaggaatctggtgtactcgaacggttcaacgaggtcatctattgccatgatgctgatgacgagggtcgtaagtcagtagagaaggtacgtgccctgtaccccgagtgtaagtttgtagagcttcccctgaaggatgctaacgacatgcttatgcgtaatcgaggggatgaggtctaccagatgatccgattcggtagcaaggttaagtccccggactgttccgtaactgtcgatgaggtatacgctgaggcgctagaaccccctaagtggggtaagagctatccctgggaaggtctaaccaatcttacctacggtcagcgtgatggtgagatcatcggggtaggtgggggtactggcatcggtaagaccctgttggcccacgagattgctgcctggaattgcattgagcacggggagaacgtagggacattcctgttggaagagcaggtagccatgacactgaagaatatcgcggggaaggtagctaacgtacccttccaccgaccggatatcgagtgggatgagcaagcctttaaagacgctgcgggtaaactccgtggcaagctcttcatgtggaagaacaagggtcagaacgattgggatcatatcaaggaatgtattcgcttctgggcagtagccatggatgtgaagactatcctgctggataacatgaccgccatgaccaaccatcttagtccttccgaaatgaacacggagatcgcccgtatctgtacagagcttgcaggtatggccgatgagttgggtcttcggatcttcatcttctcccaccttaacccgcccaagggtaatcgtacccacgaggagggcgctgaggtaaaggaaagccagttcaccggctcccgagctatgcagcgttggtgtcagcttatgatcggcttcgagcggaacaagcaggctgacggggaagagaagcacgagagcagaatccgtgtaatcaaggacaggaactacggtaatactggcctagtgtttaccaagtataacccagagacgggtcgcttggttgaacgtgagggcagttacgacgaggtacctgctgacgatgacaccccaatttgattacgttatctatgacctagagggggacggcctcttcaatacggtcacaaggctttggtgcgctgttgttgtagacattccgactggggtagtccggggattccggcccgaggaaatggatgtgttctataggatcatcgcccatgcaaagttcgtagtcggtcacaacatccttgactacgacaaccgggtccttgagaaacttcatgggattatcatacccccagatcgaagctatgacaccttggttgcatcgaggttgacttggccagataggccccagggtcattccctgggagcctggggtaagttcctgaagtgtcacaagggtgatttcaacgacttctccaagttctcagaggaaatgtttgagtattgccttcaggatggagtggtcagtcacgcactgttcaactacctcctccgggtactcggcatgacttggcaagagcttgttgaatggaggactgtagattggctaaaaagcgagtgaggaactacaagcgtgagagagaactggctattcgacgcggcgaaacgggcgtgggctctaagtcaggagatgctcagcgacaccgagcccgccgaaaggtggaaaagcgtcttggcaggaagctcggaaccgacgaggttgtcgatcatatcaaacgtgttaaagatggtggcggtaacggggattctaaccttcgcgtccgtggccgttcttctaacgctgctgatggtggtcgggtgggcgatcgtaaagccaaaggcattcgcaagaaaaagtaaatgaagaggggccttcgggcccccgaggactcactatgttcaatcgaaagcttagcatcagcaacatcctcagttccttcgacaaggtgctggttaacctgaagacctttatccaagagtcttcggaggaatctgaacggatctacaacgagatcagtctcctgaaggcggagcgtacccaggtcatgcaggacaatctgaaggcccagaaggtactggctaatctggaagaactgctgggaggtaagagtgaagaagtatcgagttaacgtggggttccaggacaccaaggtgttcaacgcagacttctaccgaatcgagttggatatcatcagattcttcgctggtgattccgatgccaaccccatgaccgtccgagctaacgagatcggtgctgtccgcggatgggtttctgtagaggagatcaatgatgaccagtaagaaggaaagcctggaagagcaggcgcttaaggagatcgccctggagaaggaattctctggtagctggggtggccccgagatcgacgctgatgacttccccttgggtagtgcctgcggcctagaccccgaggtgtgtgagtcatgtcaataaccctacaagtcctagtcatcttctggagtgcattcttccaggtatttctcctgggtctgaactctaaactccttcgggatgataagatcaaggctgggtttgtagtatcttggtgtatcacgctggctcagtttgcttacatcaaggcggtagcctcctcccacttggagatcggatggtttatcttcgtgtccgggtggggaggtgcccttgggattacctctgctcaatacttctacaggtggtacgacaaagtattccacaagaaggcttgacaaatccagaaaagtgtggtataataaccttaaggtgtccggggttgctttacccctataggagatacaaatgagtgaccatgtaagctattccaaacatgtccgtggtaagtacctgtgtaatatggcctctgccctccataagagtatggagatacaaaggactaacatccggaagttcctcagcagtccccaaattacccttcgggagaagcgtcgggtattcctgagcctccccgctggattcctgggggtgagctacttctcaggctcccacctggatctgagttcctactcgcctaaacgcaatagccgggtacgggagaaggatctgagcctgtacgacgacttctacatcgacaggaatacccagctagatccgcgagacctcttgtttacctcccaagaagagaagaaatgggagtttcaattcatgaaggagaagtggggtagtgaattcaagctatccgatgaagaactgagcgacattaaggatatccagcgcaagatcgacctgtcctggtacctggtagacctggcctgtgaacgtgggtgttcctacttcattttcgactggtgattacatgagcaagatcaagagtatcctcatggagcgggtagatgacttcctgctcaagcaagttgctgtggccttcctggagcagcaatggaagctggaccgcagtggtaccgtggactacctctcctacctggggggtgtatctaacgaagctgtggagacagttgtagagaatctggcggagcgtcttaagggggattaagtggattggagaaagtcactgttcgttgagcacaaggtagctgatatcatcagccgccagagtaaacgtggagtctacttccagactcagcgggccaagtggctgatccatgtgcttagcgaacgaatcctcaagattgaccttgaggctgtcccccagatgcccatgatgatcgtaagggctggggccttcagcaagccattcctaaagagtggtaagccgaaccaaagactccagtccctgtggcaacgtcttgggcacttcgagg

SEQ ID NO: 4 - DNA, 64096 bp, Abidjanvirus EPa5
  source 1..64096: mol_type = genomic DNA; note = EPa5
cacctcgttcctaaaggagaattgtcatggctaacggctcccgccactcgatgcgactcgttccggaggtcgcctacggcgtcacccccgcgaaccccgcgttcacgcctatccgccacaccggcaccacgctcggcctgtcgaaggaagccctccagtcagaggaaatccgcgacgaccgtcagatcgccgacttccgccacggtgcgttccagaccgctggtgacatcagcgctgaactgagctacggctcgttcgacactatgctggaagctgtgctctgcggcacctgggccaccgacgcacccgctgtcggcaccgaccagctgaaggctggcaccatccgccgttcgttcaccgtcgagcggttcttcggcgacctccaggctgcccagaagccgtaccaccgcttcacgggcgtggagttcaacaccctgggcctcgccatcgctgcgaacgccatggtcaccgccaccttcggcgtgatcggccagaacttcgcgacggacactgcccagctcgctggcgcgacctacagtgctgcctcgaccacctcgcccttggactcgttctccggtacgctgaacgagaacggctcgctgatcgccgtgatcactgagatccagttgaacatcgagaacggcctggaggctcgctacgtcgtgggctcgaaggcttcgatccgcccgtccatcggtcgttcgaatgtctccggcactatcactgcctacttcgaagactccgtcctgctcgacaagttcgtgaacgaagttgagtctgacatcgagttcacgctgccggacggcgctggcaacgtgctgaagttcaagctcccgcgcatcaagtacaacggcggccagccggatgttcagggcgaaggcccggtcaccctcagcatgcccttccaggctctgctggactccaccactggcaccaacctcatcatcgaacggacgcctgcataatgactgacacgaccaagaagactgggatggaggcgttcttcacgcgctccatcgccaacgaaggcatcgagctgcccctgtacgccccgaccggggagaagaccgagcactggctacgtgtgcgtggtatcgactcggacgagttccgcacagcggaggctaactccaagcgggacgccttccagatcgcctccgtggaagacctggcagagcgcactcgcttgatcgccgaatcccagcgtaagctggtcgccagtctcgtggtcggttggtccttcgagcaggagtgcactctcgagaacgtgatggctttcttccgggaggcccctcagatccaggaggcggttgaccggacagcgagccgtcgcgcactttttttcgcaggaagatcgagcagctcgccgctttcgccgagcacgagttccgactcgatctgatacccaaggggtcgaagcagacgcttcgggcgagcctccaacaggtctggaagaccttgcggaggaagcccaggcagctggccgaggcccctgccctgcctgaggaactcaagtatgtgtgggagtggtacagggaagtgttcaccggccagccgctgacgtattcagagctgcaccactggtccagtctgacgggcaagcggctccaaggctgggaggcagaactgattaagtcgttagacaggattttctggaaggtgcagcatgacggatatcgctcggctacagattcgaattgagtccctggaagcccaggtggcgcagcgccgcctggactccctgggcaagagcgccgggggcgctgaacgagcttcctccggtcttatgggcgctttcaagggcctgctcggaccgctcactgcggtggtttcggctaccgcagctctcaacaagttggtcgacgtacaacgccagttcgacgttctcaatgctgggctcgtaaccgccacaggttccgccgagggtgcatctcaggcattcgaggcgctccaggacttcgcagccaacactccgtacgacctcgcccaagtgaccgacggcttcaccaagctcgtgaacctgggcctcacgcccagcgagcgagccctgcagtcctacggcaacaccgcttcggccatgggcaaggacatgatgcagctgatcgaggccgtcgctgacgcctccaccggcgagttcgaacgtctcaaggagttcggcatcaaggccaagcaggagggtgacaaggtcaccttcaccttccgtggcgtcaagacggagatcggcaacaacgcccaggaaatcgaagagtacctgatgcgcctcggcgagaacgagttcgccggttccatggcagctcgaatggacaccctcgacggggcgctctccaacctgggcgacgagtgggacgctctattccgcaatgtctcgcagcagggcgtgggcgatgtcatcgaggacggcgtgcgcctcgctattgatgtgctggccgagctgaacgcgatgctctcttctggcgagatggagggctacctggacgcaattgcaggcaagttctccggcttcggagaggacatacagcagaccgttcagattctaaccaagttcatcaaggacaactttggggagtggtcggacgaaggttccgccgtggtggacttcatcatcgacgccttcaagaacttcccagagaacgtgcgggccttcgtccagatcgcagcggtggagttctcccaccagctggaactgatgaagtccgacgcgaccctctgggcagactctgtcaaggccatcttcaacgacgacaccctggactccgctgcccagcggcacgcggcacgctaccaggccctggcggaggctcgtctcagttccatcagcgatatcatggcggagcgcgatgcggcactgaagtcgttcgacgatcagatggccgcttcgaagaagctgagagagcagtacgacaaggaccaggaagctcgcagggcacagggcggcgaccggctggctggcttcaaggtcggcggcgatggtggttcctcggcctcctccggggcttcgaaggagcaggagcgtgcggccaagcagcgggagaaggacttccagaatctggtggcctccctacggaccgaggaggaggctatcgctgagtcctacgccaagcgcagggccatcattgaggccaacaccccggacggctctgcgcagcgggcagaccttctagcgcggctcgaccaggaccatgcggcacagctcgagaagatccaggagcagcagaactccgaggtggagagcctgcgttctcagctgatgaccgaagaggaagccatcgctgagtcctaccagaagcgcatggagatcatcgcgcaagccaagaacctggagtcggctcagcgcaccgagatggaagctcgggtcgctgaagagcgggacaaggctctggccaacatcgaagcccagcggcagcaggagcgggattcgctctacaacagcctcctcaccgaggaggagatgctgattcaggcatatgatcgcaagaagcagttgatccttgacagcgaagcggtcaccgaggttgagcgccaggatcttctccgacgactgaagcaacagttcgacgaggagcaggctcaggcggagaacaagcggctccagacccagctgaacggagcggctcagctgttcgacggcatggctgggctggcgaaggcttacggtggcgagcagtcgaaggcttacaaggctctcttcgccgtaagcaaggcgttctccatcgcccaggccgcaatgtccatttccaccggcctcgctaaggcccaggagctggggtggcccgccaacctcgctgagatggcacgggtcgcggcgactggggccggcatcgtctcccagattcaggggtcgaacttctcgggtgcatacgaccagggcggccagatccctgccggcaagttcggcatcgtaggagagtacggccctgaaatagttcgtggtccggcctctgtcactgggcgagttgccacggagcggatgatgcgcgaaacttccggggaaagtgctcaggcctctcctcctgtggtgaacgtccgcaacatcaacgtgatggatccgtccgttgtgggcgactacctcggcacggacgacggcgagcaaatgatcatgaacgtggtgcagcgtaaccaagctgtcctcggtcgataaggagctgacatggcgttcgaagtaggcacagcggccaacatggaggacttcttcacgaagatcctcaacttcctgaccaccagccccgcgctggtggaggccaaccaacagtgggaggttctggaagtctaccgcgacaacctggaatctctggcgattaacttcaccgaggttgacagttccgtcgctggtggtaagcgacccatccacggcatgcgacgtgacaatcgcaccctgggcagcgacaacccgaccagcgcgaactccattggggcggtccagggtgggggcgtcgtggccggaacttcccacatgaccatgaagttgagggtggcgaaggagatcacgagtgtccggctgagaagcccatacagctccgctgtgagcaccatgatctcaaacttccgacttcagtattctgacgatggtgcaacctggaccaccgctctcactgtaagctcgaacccgacctacgccatgggtgagcagaagagcttcaacgtgccagtcgcaacaggcccccgcctttactggaggctccgcattgacagcctgcagaatggatccactactgccaccaccgcctactgggacagcgtgttgctgatgaccgcctctggcgagattgccaaccacttcggcagtgaatgtgtgctgaaggcgagaggcaacgcgggggccgatgccatctacaccggcctcgctaccgagtatgacagcgctgctgggtggtataatctcttcatcaatggttacaccggctacgacccgaacgtgacctcctggttcgagcagcccggcgctctgcccagctaccgcaatcagcagggcggctatacgctggcagtgccgatggtgccactgtggaacgatcagatgccgtactggttcgcagcctctgggcgatccttccggttcggtgtcaaggtttcgacccagtacgagggaggctacatggggttcatcctcccgtacgccacccctggacaatatccgtacccactggccatcggcggttctctggtccccacctcgggttctcgctccgacgtatggcgttattcgttcaatagctttcgccacagcgtgttcgtctgccctgggtgtgggggcgacccggacgctagtgccgagagcgtggacactacactataccttcgattgccggacggcacctggggcttcgtcgggcagagatatacccgctccggctcggatccgaatgccatcatagcatccggttactccggtggcacagcccccaccttcagcgggcctcgccgaggcatgtggcctttgtcgacgcggcaccatggaaacactgccggctttgcccgaagagactacagggagattatgggaggaggctacctcactcaaccgctcatcatccatcagcgattgccgttcgctgcggtctggggcgaactcgaaggagtatatcagatctccgggttcagcaacgcagctgagaacactgcagtggtgggtgggaagaaccacatcattctccagaacgtggctcgtactgaagtccacgaatactggtctctcgaactgagctaaggggctgtcatgggatatcaaactggggttgctagcggcgtcaacgatctgctggacaagattcgactgttcgccatcgaccagggctggactgtcaaccgctggagcacacacacctacgggcgagagctgtgtgtccagaagggcacggccttcttcaacatgcgctcctatgagcagggtcagagcgtcctggtcaacggaagctcttccggcacagcagccaatcctaagtatggcatcgtcctgaccggatccgatggctactcgggaggcgcagcctgggaccttcaacctgggtatccccggcgttccgccgacgcgtcgcaggcagcccatgccttcctgccgcttgtcaccaacttcggcccgtttccgacctaccacttgttggcaccggacgacaagtgtatctacctggagctggaagtcacgaccggcgtgttccagcgccttggcttcggatcgctggacctcttcaaccccgctgtcgcaggcggtggccgattcttctactccacgcggaacgaccatgtaacgaactcgaccgcttcgaacacgtggctgggcagtgatattgacaacggcaacttcgctggcgaagaagtgcccttcaggtcggcccagttcgcgtccacgatgaactccgcctcttacgttcgatgctccttcggggcattcgacgggtgggcaggttccgctcgctggccatcttacacgcagacaagccagtgctgccagggtgggttcacccacgatggcctgctggctgagctgggctctaacccgctgaacggcatcgcgatgctgacccccaacgtggtctctgtccagattgggggtgagttcctcagcccgctgggagttgtgccgggcatgcgctacatggacatgacgaagtatcttccaggtgacgagttcaccctgggcagcgacacctggaaggtgtttccttggtatcaaaagggtggtcgttcttggcagcgcggtatcgcacacaagaaggtgatctgaaatggctgaggtcgtgatcctcgggaagtatcccgtcctctacggcgcacgccccgttccggggcagcaggagggggcagacggcgtgttctacgaggacggcagcccgccgtacctcgacaacgtgctcgccccgtctgcagcctctaggggcgtcgtaaccagcaacctacccatcggcgaggtggaaaaccgggtagcggcccagcggaggccaaccttcctggacgacttctacaaccgcatccacatacagccctcccggttggagctgggcaacctcctgtccacccaggttcgtcaggtggaggtgtggagcgcctacttggagccacagctgctgaacgccgtgacccaggtgggcacggatggcattcagctgactcagccgcaggcagccccaacctacttcgctgcgctcgagaccagagtttacgtgctgaacatcagcaccaacgggtcgccggtgatcgacgccacgtacaccttcgacttccagggcgaaaacccgacgctgcgcatcactggtcgaagagtggtggtgtggccgttcatgccccagaccaagcaccgcgaaggtcttgaatggaaaaccgacatcatcccgagcttcaagaacgagcagcgtctcgcgctgcgagcggccccgcgacagacgttctcgttcgacttccagcttgataaccaccagttcagccgtgccaaggccatcgccacccagtgggcccaccgggtctacggcatcccggtctggtccgagctgacccgcctgggcgctctccccatgggcacgtctgagcttcaactcgacacgacccaggcggactatcgggccgacgatctagtcatactctgggagagcgacagcaagtgggtcgcggtggaaacgactactgtcacgccgacttcggtcgctctcaagctcccactcgagtccagcttcatgaacgcctacgtggccccgctccggttcgctcgcactccaggggggatggagttccggcgctccagcaacgatattgccacggccaaggccacgttcctggtgacggtgaacaaagacctcggaggctccggttcctggccgacctaccgtggtaaggatgtcatgctggagcgacctgtgcttgtcggagacctgacggaaaggctcgtccggagcacagatgagttcgacaacggttccggccctgtgattgtagacatccagaacgactgggtgactagcaccaagatggtcacgttcgacaccctgacccgagccgaccgctgggctgttcgccgctggatccactctcgtcgtggccgtcagaaggcgttctggctgccgagctggaacccggacttgatcatggtcgagaaccaaggtgcccagagcacagcgctgactgtccgcccgatcagctatcctctatactacggcatcaaggacatcatggtccagctgaacgacggcagaaggttcttccgccgagttctgaacgcctcggtggatccccagggcaacgagattctgaacctggacgagtcgtttggcaccgccttcacaatcggcgaagtggcgttcatctgcttcatgtcccatgtccgctttaacgctgacaagatcgatgtatcccacgccagtgctggtcgggccacgatctctatcccagtaacggagacgcctgaatgagctattccgaatttgaagactcgctcgatcgggggacgccggtcgagctctacgagttcacgcagggtctcagccggtggtactacgccagcggagaggagcaggtcatccgcctgggccaggtctacaagcccatgccgctggtccgggatcggatcaagcagacccaggacaccttcaaggatagccttcgcctcaccttcccacgggacgatgagttcgcctcccagttcctaggcttcgcgccggaggaagtcacgacagtctcagtcctccgtgggcactacggcgacgccgctgcagagttcatgacttactggaagggtcgggtggtcggagccaaggccagcgggaacactgtcaacatcgattgcgagtcagtgttcacctcgatcaagcgccctgggcttcgcgccaagttcgagtacggctgccgccgcaccctgtacgccaggggctgcaacgtgaaccgcgaggcttaccggctcgacggcgaggtgatatccatcgctggtgggctccgtgtcggggtggcgggctccgcgaacaagggggacggctacttcacgggtggtatgctaatcgctcctagcggtgcctcgcggttcctgacagcccactcaggggatatcgtcactcttgcgaggcccctgcccgagctcgtgggtgggatggtcgtcaagatctaccctgggtgcgaccacctcatgggcacttgccagggcaagttcaacaacctggataacttcggagggttcccttgggtcccgacgagaaatccgttcgacggcagctcaatcgtctgaggagttcaccatgggctgggtagcactagtcatcgcagtcatcgccatcgttgtggcctacgtcatggctcccaagccggagagcaggcccccggcagggctcagcgagttccaactgccaaccgcagaggtaggtcgagagatccctgttctgttcggcaccagaattatcgaaggtcctaacgtagtgtggtacggccacctcaaggccgtgcccgtcaagaagaagggtggcaagaagtgacagatcaggttatagtccgcatggagcactgccgccagctgcgctactgcgcaaggggagtgcgagaactgttcctccgctgtgggttggattactccgactttctggcgaacggcatacctgccgagaagctcctggaggcttctaacaacgacgcgatggtccaggacgtggtggaggtggctcgtgggtagtagcagcagcaaggcacaaacagtcggctacaagtaccacctcggcatccacatgattctgtgccacggcccaattgatgctatcacacgcgtcgacgttgatggcaaggtcgcgtggacgggcaaggccaccagccgcatctcgatcaacaagccagacttgttcggcggcgaagagcgagagggcggggtaagcggggaagtcgacgtcgcgctcggggctgtttcccaggggcggaacgactacctacagggtcgacttggatctgccatacctgcgttccgtggagtggtgggcgcaatcctgcgccagtgctacgtagggatgaacccatacatcaaacgatgggccttctggggccagcgcatcctggttcgccaggacggcattccccagtggtacatagcaaaggctgccatcggccaggacatgaacccggcccacatcatccgcgagtgcctgaccgaccctgactggggcatgggctacccggaggaggacatcgacgaggacaccttccgcgctgcggcggaccagctcttctccgagggcatgggtatgtcactgctgtgggaccgctcaatggagctcaaggacttcattcaggaagttctcaagcacatccacggctcagtattcgtagatcgcagctccggcaagttcaagctgaaactagctcggggtggatacaacatcgacactctccttgtgctcgacgagagctccattgagagagtctccgacttcaagcgcaacaccgttggggagctgacgaactctatcaccgttgtgtactgggacgcctccacagggcagcagggttcggtcaccgtccaggacatcgcgctcgcggcccagcagcaggccaccgttgggaccaccatgcagtacaccgggttcaccaacggcaccatcgcgaccagggtggcggcccgcgacctgaaggccctctcgacgcctctggcgggcgctacgatatacgccacccgcaaggccgcagggctcaacatcggtgatctgttcgtgttcagctggccccggttcggcgttgagaagatggtgatgcgggtttccaacgtagagctgggcaccctgggcagcaacatcgtcaagatcaccgctgcggaggacgtgtttgccctctccgaagccatctacgcgcctccacctccgagcggttggactcctccacactcggcacctgccccggtgccctaccagatcgtaatggaggctccgtactgggagctggtgcagcgcatcggggagacaaacgcccagggcatcagcgctgacaccggctacattgttactacgggcacacggcctgtcggggatgccatcaacagccgcatcttctccagtacgagcgccaatagcgggtacgagcagggaggcaccgccgacttctgcccttccgccttgctgggcgtggcgatcggcgagactgagacggttctttcgctgacctctggggaagatctctcacaggtcgctgtggacagttacgttgctctcaacaacgagatcatgtcagtggtgtcgatcacggacacgacgatgactgtcaagcgtgggctcctcgacaccatccctcagtcgcacgcggccaactcccgtttcttcttctacgatgacttctgcgagacggacacgttcgagtatgcagtcggggagaccgcctatgtgaagctgtgcccagtcacgggccagggtacgctggagctggcctccgctccagcccgctccacgctcatccaggggcgagcagcgcggccctacccaccggggagggtgcggctcaacacggttgcctaccccacctctctgagcggccagctgagcatcacctgggcacaccgcagccgtacccagcagaccaccggcgcaatcatcgaccaggactacgcaagcatcggcccagaggacaagacccgctatggactgcggttcctgaacgcctcgaacaactcagtgctggcggagaagactgacgtctccgggaccgaagccactgctgttctcaactttactggcaacgtcacgatggagctatactctatcaccgacaatggcccgagcctcatgcggcaccggcgaaccttcgcctacaccccgccagcaggaacgacagccagcacaatcaccgctgggacctacgtcccggatagcatcatctttgacggcggaggcgcgtaaatggctgacatagtcatcccccagcggttcgcccagaagcgggacaccacgaccaactggacggccaagaaccccattctgtggagcggggagatcggtctcaccatcgaccctgggcaggccatacgcctgaagatcggcgacgggaccaccaagtggtcagacctcccctacttcgccagcaacggcaaggaagtcgagctccagaagaccgccacccatatccagtggaggctgaagggcgacaccgcctggatcgacctcgtgcctctttcggaactgaagggagagaagggcgacactggagccagcgcctacacactcgccatgagcgacggcttcgtcggaaccctaaccgagtggctggcctcgctgaagggtgagaagggcgacactggagcccccggtattgcataccagaagcgcatcctggttgttcctgacaccaactcagggacgcttgcttgcgactggggtgcctacgatgaaatccgagtgacgctcacggcgaacgtcgctcttagcttctcgggcgctctcgacgggcaggcatgtctgatcaagatgcgtcaagactccactggcggcagggtagtttctctgccagcgggcgtgcggttcaactcgttgattacttcgtacgcagtttccacggctccgggtaaggctgacaagatcggcttcatctacgacggggaagactccaagtacgacttggtctcgatcatccctgggctatagtatgggctacgtaccggaagaggaagcgaacttcagtggggagtcttacgaggccccttcgggttcggttgctgtgttcagcttcggcgacctaaacagcgccgagtttctgttcccagggaccggctacctgccgcccagcggcagctccgccagcttcctcttcctggctggtgaggatccaggaggcgaaccacagccggacaccggcccactcagggccaactttatgattctactagctatgtgaggcaaccatgaccgttcgagtttacaagtccaccgacaccgacgctccccagatcctgggctcccgcgccggtgatcttatcaatctcctagacaagtgccttgtcacgggctatggctccaagctgcccgctgggtggaccaagcccttcgtaggcacgaacatcgctgcgttcaagcagggggccgggagcaacggcatgtacctccgggtcgacgacacttctacggcggccaccagccgcatggcgaaggtgaagggcttcacctccatgacggacgtgaacacggggctggggcagttccccactgagagtcagtacgccggaggcctgaactggatgctgttccagagtgggacggcctccttcgcccgcaactggatcctcgttgccgacgagaagctgttctatctctccatcgagacggcaccggaacaaactagcacccagtcgtcagactactatcgcgagttcatgtacttcggtgacatcaacaagtacggcaccacagacgaatcggctactgttctgtgggggcaccagaacacaacgttcaacacgtctcacaacgtgccgttcgattcttcgactctcaacgccagctaccctggcctattcctggcacgttcgttcagcaacctgggaggttctttgccggctggccagcaccatgactactacaagtctggcgccagcagcatctggggagctgtcggttcctatctgtcgtacccgcacggcccagacggtgggcttatcttctcccctgtctgggttcatgagccggggaccgcaggtggagcccatatccgaggcaccttgccgggggtctgggctcctctccagaacgtcttcgcacacggggacacgtttgagggccagggagagctcgcagggagaaccttcctggtgtttaagcactaccaatgccgatgcgccttggagatcagcgacacctggaggtaaccatggcagacctcggaccaattaacgttaccatcggagccagggtcgctgttcacgaccccggcactgtctcgttcgtacgctctggcctgacggtgatcgccattgcgcgatctccgacggctgggactcccccaacgatggtctacgagaggccggtggacatgcccgaccacccgctgtggtgggagccccaggcagggtcaggtcgcaagtatgcttggtactctgtgcgcggctacgtcaggcagctggccaaccagcaggaggttcctgtcaagaacgcgagggtgcgcctctaccttcgctccacaggagttatggttggcacggccattacggcggaggatggttcttacgagttccagcggctcatgtatgattcctctgcgtactatgcaatcgcactggacccggacggggagcctctccagaactccttaattcttgacaggctcacgccagtactgacatagccctccgtcaggagtcatgtaagatgactccccagatcatttcgctttctggggagtcagctcatggccgacaacgaacaagcagtagccgtcgagctggcgcaactgagagaacaagtgaagaccgtcggggagaacgtctccgaaatcaaggccactatggccgctctcatttcgctcgacaagaccattgctgagctcgcaatctattcaaagcagacccaggacaacgtccgcctcctgtgggagcggttcgaagagtccaagcagtggcagcaggcccacgagcgcgagctccacgaagtccgcaagatcagccacgacgccctggacaacgtccgggacgaggtccacaaggaaatcctcaccactgaccgcaaggtcgaagcctggaccaaccgcgtgcgcggtgcctcctgggccgctggcatcatcatgggcgtcgtccaggtcgctgtgttcgcctccattggctggaccttcaccaacgtgacgagcctccgcgagtcctcccaggtggacacgctgcggatcgaccggctggaggaacgcgcccagaagcgcgacgccgaggagcgcgagcaggacatccgtctcagggcgctccagcagcagcccgcaaccatcattgaccggaggtaacaccgatgtctaagttcatcctggggcaccgctccgtccagcgactgctgaccgtccacccagacctcgttcgcgtggtccaccgggccatcgaactgactgaggtcgactttaccgtcctcgagaccctgcgcaccgtagagcgccagcgcgagctggtgaaggctggggccagccagacgatgaacagccgccacctccccggcaaggatggcctctcccgtgcggtcgacctgggcgcttacgtcgctggtgaggtccgctgggactggccgctctaccacaaaatcgctgcagcgatgaagcaggccgcgaaggagtgcaacgtcccgatcgagtggggcggtgactggaagtccttcaaggacggcccgcacttccagctgccacacaaggagtacccggcatgaaccctctcctgatcggcccggtgttcgagctgggctccaagctcatcgacaagatgttcccggacaaggagaagcaggccgcagaacgcgcccaggcggagctagcactgctcaaggcgcagcaggacggtacgttccgggaaaccgcccagcagctctctgcaatcctcgcggaggcccagtcggcggacccctggaccagccgcgcccgacccagcttcttgtacgttatgtacgtgatgctgctggccgccatccccatgggcttcctctccgcgttcaacccggcgatggccgaggcggtggccaacggcatgaagatgtggctgtccgccatcccggaggagctgtacacgctgttcggcgtcggctaccttgggtacgctggtgcacgcacctgggaaaagcgaaagggttcggcccggtagcggcttgggttgcttgggttgcgctagtggccttgctttttctaaagtcaccgcaaccccgcatgcccacagggtcctaggcccccgactctagttactctactttctttagagagaaagaggagtaagaaaatagccttcccgaggcggctatccccgccctgggcctcaaaagcctagcgacttgcaaagcacccgagtaacccgagtaacccgagccagccctgtgctggcgcgggtcctagctgtcttggggttgcctcccaacccgagtcgggcggagcaacccaagtcgggtgcaaggtgattgcgcctgggcgacagcgccacaataattcgccttggcccttagaaaaggaggacgaacatgcgtccctatgaaccgaaaacaaaacccttcaagcaccaagctgaagagttcgagcgaagcaaggacgccccagcccgcgccatcttctgggagcagggcaccggcaagagcaagatcaccatcgacaccgctggtcacctctacgcttcggggcagatcgactgcgtcgtcgtggtcgccccctccggcgtgcacctgaactgggtgaccgacgaaatcccaacccacatgcccgactggattcgagagcagatgttcgctcacgtctacgctggagacaaggccggtacgaagtaccaccaagcccagtgtcagcagctggtcgagcacaagggcttggccttcctggccatcacgtacgactcgctggtgaccgagcgtgcgaaggagctcctctgggcattgctccagcggcgcaaggtgctctacgtcgccgacgagagccagcgcatcaagacgcccaaggcgacccggaccaaggtggctgtcgcatccgccaagttcgcggccttccgccgagtgctgtccggcaccccggtgacccagggtccgttcgacgtgtacagtcaagtgctgttcctggacgaagacttctggaagcgcgaggagatgtctccgttcaccgtcttcaagaaccacttcggcgtgtggcgcaagcaggccaccgacactgggcggaagtacgatgtccttgtcaaataccgccgtctgaacgacctgaacgccctgctggagcagatcagctcccgcgtgacgaaggaggacgtgctcgacctgccgccgaagctgtacagccgccgctacttcaccatgaccgccgagcagcgccggatctacgagtccatcaaggaagagttcatggcgatcatgctctccgaaggagactgccggaactgcggcggaactgggcgcgtcgagtacgaaggcttcgccggagagtgcccaacctgcgaagggaccggcaagcgcctgggcggcatggtaactgccccgctggccattgtccgcctcctgcgtcttcagcagactctgtgcggctacgtgccggtcgaaaccttcgaggaaggcaaggagcctgagctgacgatgctgcccggtgggaacccgcgccttgccctcctgggcgagatagtggaggatcttccccatcagttcatcgtgttcgcccgcttccggaaggacatcgacctgatcatggacctcatgaaggagctgaagatcgaggctgtgcgctacgatggagctctggacgttgacgcccgcgccgcctcgaagaaggcgttccaggacggcaaggcccaggcgttcgtggctaacccagctgtggcggctgaagggctgacgctcgtcggggcgaagaccgttgtatactacaacaacagcttcaagctcgcggagcgactgcagtccgaagaccgggctcaccgtattggccaggatcaggctgtgaactacatcgacctagcgtgcccagggaccgtcgacatggcggtcatagatgcgctgaagaataagcttgacatcgccagtcagattactggcgatcgactgaaggagtggctctatgagtagccaacagaagaagggccgcgtgttcgtggtccagaagacaatgcgatgggacagcaccaagggtgaactggtccctaagttcgacgtgagcccggcccaggagtatggcgagatcgtctacctgctgagccccacagcctcgccgttccgccccgacagcctcctgggcgaactccacgagaagctgaaggacttcaccccggacgactacctgctgctgatcggcagcccggtcatcatcgggctagcggttgccatcgctgccgactataccgacggcgaggtcaaggttctccagtggagcggcaaggcgggcaagtatctcccaatcgaggttcgcggcctctttaatgattgcgggccggtttagtcttcaacagacttcatcttgcaatgtaacggcggcgatccgccacgaactggaagagaaaacatgagccaagacaacgacgcactggcatacgcccagtacaccgacagcaccgctacctcggagaacgccctggcggagctctcccgcctcgctgacgagcaggcccaggccgctgcccaggtcgccgacctggaagcccagctggacaaggcccgcgaccgcttccgcgacatcagcgagcgcatcatccccgagaagatggacgagctcggcatggaagagttcaagacccgcaccggcctgaagatcaagatcaaggaagccatccgcgcctcgatcccgaaggcccggcagggcgaagccttccgctggctccgtgacaacggctatgctggcctgatcaagcgcaacgtcgctatcaagttcggcaagggcgaagacgagaccgctgaagagctggccaagcagctcagcgagaagttcgaggtggaagacaacacctccgtccacccgtccaccctgaaggcgttcgtcaacgagcagctctccaacggcgtcgagatcccgatggacctgtttggtgtccaccgccagcgagtttcggtcatcgcctaacctgggcgaccgaccacagaatcccgtcacctgggcagtggtgagcttgtcggcagactgacgtctatcgcaccgggggacgctaaaccgcctgctgcttactatgtaacaaggagccaaccatggctaacgaaaaagctgtcgcagaagccaagtccaacctgcccgtcgtccacgactacggcgactatgccggtgccggcttcgagaatcaggatcgttccgattactcgattccgttcctggcggtcctccagggcctgagccccgagctcgagactctggaaagcgccaagcctgggttcatcctgaacaaggtcacccaggacgttgtgtcgggcaaggacggcatcgtcttcgttccgtgctacacccagcacgtgtacgtcgagtgggtgccgcgtgacgctggtggtggcatcgtcggtatgcacgaactcgactcggaagtggttgcccaggctcgcgccgcagcccgcaccggcaagttcaccatgccgaacggcaacgagctgatcgaaaccttctacgtctacggcatcgtggtcggcgaagacgaaacgacctctcacgcggtcatcgccttcacctcgaccaagatcaagaagtacaaggcgtggatgacgaaggctcgcaccgtccagatgcgcctgcccgacggtcgtaagatcaacccgccgctgttcgcccaccgctaccgcctgaagacggtaaaggagaagaacgccaagggtgagttctacaactgggacgtcagcttcgacggcgcaaccgccgaagcctgccgtctggctccagccgactccgtgttccaggaagcggcccagtgcatggaactggtgaagtccggtcaggcgaaggctgacctctccaccgaaggccgtgaccccgatgaagcaatggcagccgaggcggaagccgaaactgctggcgctccgaagggcggcaaggccccgttctaacgaacggcggtctacgaagcgggagggtgacctcccgcttttcacatgagaaaaggagccaccatggacttcgcgccacagcaggaccaagccctccgggcgatcgactactggttcaagaaccgcacgaaagagcaaccaatcttccgcctgttcgggttcgccgggacgggcaaaaccacattggcgaaacacatagccgccaacatcgacggtctggtcatcttcgcagccttcacgggcaaggccacccacgtcctcaagatgaagggctgtccggtcacctcgaccatccaccaactgatctatgcaccgcgtgagaagggtcaggcccggctccgcgacctccagtcgcagctggtgcgcgagaagacgaagaaggacgccagcccgaagcgcgtcaaggagctggaggagttgatcgccgcagagcaggcgaacctccgccgcccctcctggaccctgaagtccgagtccgagctgcgcaaggcgaaactcctcatcgtagacgaagcgtccatggtcgaccagcccatgggagaagacctcctgtcgttcggtgtgccgatcctcgccctgggcgaccctgggcagctggcccccatcaagggcaccggcttcttcaccaacgtgaaggccgacttcctcctgaccgacatccaccgccaagcccgcgacaaccccatcattgagatgtcacgtattgtccgggagggagggttcctccgccttggccagtacggctcgagcgaggtcgtcgacggtcgccagttccagcgcgactgggtgttctccgctgaccagatcctggtcgggaagaacgacacccggaagagctacaacgcacgaatccgggaactgtccggagcggctcagccgctaccgtccctgggcgacaagctggtctgcctccgcaacaaccacgacgtagggctgctcaacggctccctctggcgcgtggacggcccagccctagacaccggggacgggcaggtctacctggagctcctaggtgaggaggggcagcggatcgtgacttcggcccacgcgtgctacttccacggcggagagccggaatggtacgagaagaaggaagccgacgaatttgactatggatacgcgctgacggttcacaagtcccagggttcgcagtgggacaaggttctggtcatcgacgaatggaagcgacaggaccacaagcagtggctctacacggcaatcacgagagccgcagagtcagtccgtgtcgtaaagatgtaatgccggcaagcccttgccggtataaacttgaccgctccaaccctgttttagaggattcctcatgaacgaaccaaccgacaaggagacttcgccggaaggcgaaggtagactataccttagtcagatcgaaacaccaactgattcttacgtcacccgctacccgaaggccgttgaaatggccatccagcagcaggacatcttctggcccgccgaggaactcggtgtcgaggaggatgaaggcgacttccgaaccaagctgaccgagggcgagctgcacggcatcctcaccgcccagtcgatcctcacccagtacgagctgatgatcggcggcgacgagttctggggtggcaccatctcccgcatgttcccgcgccctgagattcagcgcatgtgcgcctgcttctcgcacgtcgagctgggcagccacgccccgttctacgccctgggcaacgaggttctgggcaaggccaccgacgagttctacactgagtggaagcgcgacccggtactggctcagcgaatcaagttcatcagtcagaaggctgcctccaaggacgccctggaagtcaccgccgccctggccttcttcgagggtgctgtgctgttcgcgaacttcgcgtacttcaaggcgttcaacagccggggcttcaacatgatcccccacttcgtcgccgggatcgacggctccgcgaaggacgagaacttccactccctggcctccagctggctcttccgccagtgtaaggccgagcgcgtccagctgggcaaccactcggtcgagcaagagcaacggctggcggactacatcctgcgcatggcacaggacgtgtacgagcacgagctgcgcatcgtcgacatgatcttcgagaagggcggcatacgcgtcatcacgaaggaagagctcattcagttcatccgcaaccgcgtcgacgtagtgctggcctacctgggctaccccgcgctgttcggcgacgagaagggtgtcgtgtccggttggttctaccagcagctgtcgaccttcaagttctccgacttcttcgccgccacccaactccagtacacccgcaactgggccaagcacaaactgaccttccggaaggagctcgcaaatggcgtttgagatcacgggtggcgttgacgaagccaccatccaacaattcgagctgctcagcgccgagcgcaagcggctccaggccctcgggctgctgccagaatggtacacgactcagggttggcagatgttcaagcagaagtacgcggtcgaaggcgaagaggcggtctacggtcgccatcggaccatcgcccgaaccctggcccgccacctccgtggtcgcgaggacgagtgggaggagaagttcttcaacctcctgtggaacggcatcctgtcgcccgccagcccagccttgggcaacacgggcaccgaccggggcatggtcgtctcctgctctgggcaggtggtcggcgacagtgtggacgagttctacagcgccctgcgcgagaccgcattgctgtccaagtggggcttcggcacctctgcagacttcagcggcatccgcccacgaggagccaagatctccactggtggcctggccaacggagctgtggaagtgatggaagacttcttcaccacaactggcaagatctctcagggcggcaagcgccggggctccatcggtgcctacctggacatcgagcacgacgactgggacgaggccgtcgacggtctggtcagcgagcccaacgggaagaactacggctggatcgtgcgtgactccttcgtggagaagctgaagaacgacgacccggaagccaaccgccgcttcaccaaggctctgcacgccaagctggtgaccggcaagggctatatcttctgcatcgacaaggcaaaccgccaccgtccggcgatgtacaagaagtggggcctggacatcaaggcgtcgaacctgtgcaccgagatcatgctccactcgagcccggagttcacctacagctgcatcctctcctcgctgaacctgattcactgggaccgcatcaagaactcggacgcggccttcgtcgccaccgtgttcctggactgcctgtgtcaggagttcatcgagaagagcgccagcatccctgggctcgagaaggttcgcgagttcacgatcaagggccgcgccatcggcctgggcatcatgggcttccatacctacctccagcaggagcgcatcccgtacatcggcctggaggcccagttcctgtccaatgagatctccaagcacctccacgacgagagcctccgcgcctcccagtggttggcccaggagtacggcgagccggagtggtgcgaaggcttcggggtgcgtaacacccatcgcacagcctacgctccgacgaagtccaccgcgctgctcatgggcggtgtctccgagtcctggtcgcccgatccgggcatgatcttcgacgcaggctccgccgtgggcgagctccgccgcatccctccggtcatctatgaactgatgaaggagcgcggggtctacagcgaggccacgatccaggacatcatcgaccacttgggctccgtccagcatgtcgactggctgagcgccgaagagaagctggtcttcttgaacgccttcgagatggaccagcggatcatcctccgtcacgcctcccagcgccagaagtggacctgccaggggcagtcgctgaacttcttcgttccggaagacggcagcgaagacctcatcgccgagctcatgacccgcgtgctgctcgacgaagagatcctgtctcagtactacatctacagccgctccggggtggttgtcaaggatgagtgcgtggcctgcgctgcctaaggccaagccccggtcttcgggccggggcaatttattttgccaaaggggcttgctttctgtcttcgccgaggcataatggcgtcactgggtcgctactgacctaaaccagaaaaggagaagcgccatgaaatccatccagatcgaaaccacccaagtatccaagttcgaagacctgagcgccgtgtcgaccgctggcctcctggccttctacaacgccgagaccggcaagaatacctcgaagtttgcctcccgtgccaagggcctgatgcaggtctgggctctggtcgaaggcaagctggccgcccaggaggccaacccgcacgctgcttcgaataagctcatcggcgagttcctggcccgcgaggaggccgctgccgccccggcccccgaggttgcccccgcccccgccccggaagaggcttctagcgccgctccggcagccgagaaggctcccaaagagcgcaaggcacgcggcttccgcttcaagttcatgaagcgtgacgaaatcaagaaggtcaaggaaggctcgaagcgtgccgtactcctggacctgctgaagcgcgagggcggtgcaaccttcgaagagtgcatggccgccaccggctggaaccgcaaggactgctacgaaggcatccgcctgctgcactactacgttggctacggcctgaaccaggacgagaagaccggcaagatctgggtcgtcgcctaagttcccacctggagggctccggccctcctctcaaccctgaaaaggagcaacaccgtgtcaagaacctacgaacgcctccccatcgaagtcttcggagcgcacctgctctccaccgtcgacctcgacccgatctacctcgccctccgcaagatggagatgtcggaagcccagatgcaccgctggctgctggcctactggtgctgctaccacgctggcgtggcatcctacctctccgagttcgaaggcaacgacttcttcgaggctctcatggtcgccgccgtgaacgagcagccgactcccctgggcgaccgctggccccgtggtggtgaacgtcgccactggcgtggtgcccaggccaccagctgcgtcgagtcgctggtcaagcgttacggcaacaacgctgaaggcatggccgagtactgcgcgggcaatggcggcaccttccaggaggtcaccaagcgcgtccaggagcaccggctcttcggcccgtggatcgggttcaaggtcgctgacatggtcgaccgcgtcctgggcctcccggtcaccttcgacaacgctgcggtgttcatgttcaaagacccgtacaaggccgcgacgattcagtacgaggtgaaccccaacatcccgacgaaggtctacccggacggctccgaggccccgcgtgaccgcgagctggtgaccccggacgtagtccaccacgtggccgagcacctgatcaagcacttcagcggcttcaacgctccgccgctcggcgaccgccctgtgaacatccaggaggttgagacgatcctgtgcaagtggaagtcgcacatgaacggccactaccctctgttcaacgacatcaccgagatccgtcatggtgcagcgccctgggcagcccactccaagacggcccaggcattcttgaacgccatgccggaggcatccaagtgaaagaagtagtcatcatcggaggaggcctgttcggctccatcgccgcagccgccctgcggaaggacggccacgaagtgaccgtcatcgacgcccagaaggagggtgctggctccaagcctgccgcctgcctcatgaaaccgagctggttcagctccatgggcaaggagaagttcggcccgtccctggaactgctggacagcctgtatggtgtacaagacctgagccttcgcgttggaccgctgcactccaccgtgcactggtgcgacccggcccagatcctccagcctgcggacctgtacgacgaggtcgaggcgatccagtacaacgtcggtggcccattcatcctggtgatgaagagcggcctgttcatcgaagccaagaccgtcatcgtcgcggctggcgtctggtccggtgtgctggcccacgtccctgggctggtggggcgtgccggggtggcgttccgctggagagacatgcagctgactgaagggttcgtaaagccctgggcaccgtatcgccagactgtgggcttcaacatcagcccgaacgaggtgtgggttggcgacggctccgccatcaagcccagcaactggaacgccgagcgcgaggcccagagctacgctcgcagcgcctcggccatcggtcgggaaggctacggcgacctcgcccaggggcgtgctcgctcgctctacggcattcgaccctacatcccggacgccaagccgtgtctcatcaaggagaacctgcccggcctctgggtcaacactggcggtgccaagaacggcaccatcgcagctggctactcggccagcgttctccgggaggctctgaaatgatccgtaccgcaaccccagcagaccacaaggcgatcctccaggtcgccaagcaatcgaagtacaccaaggacttctctaaccaagtgatgttcagctccgaagccgcctatgcgaagggctggattcgtgtcaaggaagtcggcggtgagatcgtcgggttcacctgtatccgcgagaaggtccgctctccggagaccgtgctctacttcatcggtgtgcacccgaaggtgaccggctgcggcatcggccaagagctcatccaggacatcatggatcgcaccaagcaccgctgcatgacgctgaacgtctcgaaggacaacagcgccaagcagttctacgacaagctaggcttcagcgtcgtcggggagtccctgaagggcaccggcttcgctctcaagaaggagtggtaagcatgaaacaacgagtgatcaacatccgcggaacctccggctccggcaagtcgaccctgatccgccgcctcgtcgagctgtacccggagaagactccggtgcacgtggaaggccgcaagcagccgctgtactacgagcttcgcggcgagggcctcgccccgctctccctcctgggccactatgagacggcctgtggcggttgcgacaccatcccttcgatggaccgcatctacgagctggtgcgcgagcgcctgggcgctggggactccgtgctgtacgaggggctcctaatctccgccgaggtgaaccgagcggtggcgctccacaccgacggcttcgacctgaccgtggtccacctccagacgcctctcgagctctgcgtggacagcgtcaaccagcgccgctgggccaagactccggacaagcccggcgtcaaccccaagaacaccgaggccaagttcaagcagaccattgcgacctgcaagaagctgaaggcccagggtatcccagtcatcgaggcggatcgggacggcgcgttcgacgccatcaaggagctgctgaagtgatcaacgctcccgctttcttcgagtacgctcggaagcggttcgccatccacttggccaaggacgtcgaaggacgtcccggcccctggaccgacgacccgatcctccagagctatcgcttctgcaacgtccaccgcgaggacgacaaggtcaccaagtggttccgcgagaacatccgtgggccgctggcgggcagcccccactgcctcctggcgaccgtagcgttccgctggttcaaccgcatcgaaacgggcgagctgatgctggacccatcggtcgggctgatggagggccgctacgatggggaggccctcaagaagctcctgctcgagaagttcccgaaaggcccatggacgaccggcgcgtacatgatcaagagccccggtggaatgtccaagatcgacggcctgaactggtgcatcaacaacatcgcgaaggaggcccagcacctcgctcagcacatgctagacgaagagccccagctggagggtgtgtgggaggttctccgtgagtatccgtaccttggcgacttcatggcctacgaggtagtgaccgacctccgcttcacggagctgctccaggacgctccggacgtactcacctgggccaaccccggccccggcgcggcacgcggcctctcgcgcgtcctcggcctccctctggacgccttcaaccggcattctgagaaggatcgggtgaagctgattgctggcatgcgcgatctgctggaactttcgctccagcctcagtactggccccaggaatggccccactgggagctgcgcgaagttgaacacacgctctgcgagttcgacaagtacgaacgcgcccggctgggcgaaggccgacccaaacaactctaccgacacaacagaaacggagcctgacatgcaagtgatccaagggcggaacgcccactccatcctccccgaggcgctctaccagatgcgcacccacggcgtcaaccgcgacagccgcaacggccccgtgctgaagttccctgggccagccaccatccactacgcctgcccaactgagcgcgtggtcttctggggcgagcgcgactgcaacccgttcttccacctgatggaatcgctgtggatgctgtccggtcgcaacgatgtcagctatctgtctcagttcgtgccccgcatggcttcgtactcggacgacggcaagaccttccacggtgcctacggccaccgctggcgtcagcacttcatgaccgaccagctcgacctcgtggtcgaggctctgaagaagaacccggacgaccgccgctgtgtcgttcagatgtgggactcccgcactgacctgggcttcgagggcaaggacttcccgtgcaacacccaggtggtgttctcggtgaacgaaggcagccttgacatgtctgtcttcaaccgctccaacgacctcgtctggggtgccctgggcgcgaacgcggtgcacttcagcttcctccaggagtacatggccgctcgcatcggggtgccggtcggccactactggcagatctccaacaacatgcacctgtacctggagcagcacgaaggtctgatgcactccctgggcgaccgcgccgaggagttctaccagttccgcaccggcaaggacgacccctacgccactggcgaagtgaagccgttcccgctgatgtcaatcagtccggagcagtgggagctggagcttgaagtcttcatgcacttccctgactccaccgggctcaccgacccgttcttccgcgaagtggcccgcccattgttcttcgcccatcgcaccttcaagcagatgaaggacgcggggctggatcgctacgactgcgccgccgaacacctggaactgtgcgccgcttccgactggaagaaggccgctgaagaatggctcctgcgccgacgcgccaactacctgcgagcacgcgacgatggcccacgctacgacaattgaggcaagcgaagtgaagattccccagacccgactcgagtccgtgatcgaacaagccgtgaacaccgtgtccggcttcatcctggcgtggctcgcgtggcagttcctggtgccggtgctggtccctgggctccagccctccgctgggcagtcttgggctgtcatcttcatcttcacggcgatctcgatcgtgcgcggctacttctggcgtcgcttcttcgagaacggtgttcaccacttcatcaagacgttgatcggacggttctatgagcgtaaatgacaagcaggtggcggggagccactacaagtcgaagatccagcactgggacttcgtggagctgaacgagctccgctacatcgaaggttgcgcaacgaagtacgtgacccgctggcgcggcaagcacaactacccggacatgctccgcaaggttgtcgcctgtttcggcatcgagctgccgacgcccaaggaagacctcgccaagtcgctccactacgtggagaagatgatcgacctgaactcccgtgggctgttcgacccacgcccaggtccggtgctgaccatcacggtcgacgacttcgccgaagcgaactcgctcgacaacgacgagaaggtgatcatcgacttgctggtgaactgggaagacgcggatcagcttcggctggcgacttacgcgatccagagactcctggaagcgccggacaagtaaactaagcgaaacagcgaagggctccggcccttcgtttcattcagaaagggagaacacccgtgaagacgttccaatacacccaagacctcaagccctggggcaaccaccactggtcgaccgccgttcgcctggagggcggcagcgagttcccggtcctctacatcaagcattcgagccgacacgcgaatgtggcgatcaaccacgccatcggcactgagatgctgaaccgcgagggggtggtgctcatcaagtcccgctcccagtacttcctgctggaggcgttcgagctgaaccagctgctcatcaagcacggtgccttcaccaagaagacaaacgaagcggaaagctactggctgctcagcagcgagcacttgggcgaagagttcctggtcgaatgcctgggccgtgctgaagagccgaagcccaaggtgcagtggacccagtttaagttcgccgagtccgaccgcgccttcgaagaagtacgcgacagcctgggcatggtcagcaccttctacaaccccaccaccgctcgtattctcaaggagttgccgccggagttcgatctcgtcatgatcgaccgcagcgaaaacaccatctggcttggacggaagaactgatgcaggtaccactcttgactccattctctggttggaaggctccagacctgaacgccctgccctcctgggcggggcacaagcgcatcgcggtcgactgcgaaactcgagacccgttcctgaagaccctgggcccaggcgttcgccgtggtggtgactcctaccttgtgggtatctcgttcgccatcgaggacggccccagcggctacctacccatcgcccacgcgggtggtgggaatctcccgaaggagatggttctgaagtacatgaaggatcaggcagctgtgttcgacggtgagatcgtcggggcgaacctccagtatgacctggactggttggcccagtacggcatcgtgttccgccgggcgaaatacttccgcgacgtccaagtggccgagccgctcatcgacgagcttcagctgtcgtacagcctggacaatatcgccaagcgccacggcatcgccggtaaggacgagaccctcctgatgcaggcggctcgcgcctacggcatccacccgaagaaagacctgtggaggctgcctgcccagttcgtcggcccctacgccgaggaagacgcccgcctcccgctccagctgcttcgccgccaggaacgcatcatcgacgaccaggagatctgggacatctacaacctcgagtcgaaggttctgcccgtgctggtgaagatgcgtcgccggggtgtccgggtgcacgaaggtcggctcactgagatcgagcgttggagcctccagcaggagaccgaagccctcgcccaggtccggcacctgaccggcgtgaacatcgccgttggcgacgtttggaagaacgaagccctggccccggccctcacccacatcggcctgaaactgaacaagaccgccgagggtaaggtctccatcgacaaggagttcctggctggcgtcgaccacgatgtggcccgagccctggagcgagcgcgcaagacgaacaagctgcgcacgaccttcgccgcctccgtgcgagagcacatggtcaacgggcgaatccacgccaccttcaaccagctgcgcatggagaaggacaacggtgacctgggtggggcagcctatgggcgtctcagctgcgttcaaccgaacctccagcagcaaccggcacgggacgacttcgccaagatgtggcgtggtatctacctccccgaggaaggtcagctctgggccgcgctcgactactctcagcaggagcccaggatgacggtgcacttcgctgagctctgcggtctgcccggctcgaaggaggctggcgacaagtaccgaactgacccgaacgcggacaaccaccagatgatggcggacatggccaagatccagcggaaggccgcgaaggagatcttcctgggcctctgctacgggatgggtggagccaagctctgccggaagctcggcctgccgaccgcctgggccgtgcagcaccgcaacatccggggcctcgtcgcgctggataccgagcgcgggcaggagctcctgcgccagggtgggaagaagctcgagattgctggcccagaagggcaggcgctgctcgacaccttcgacgccaaggttccgttcgtgcgccagctggcccgccgctgctcgaaggttgccgccgagcgtggctacctcatgacactggccggtcgtcgctgccgcttcccgaagacgcccgagggcaagtacgactggacccacaagggcctgaaccggctgatccagggctcctctggggaccagaccaagaccgcgatggtcatgctcgacgaggctgggcactacctccagctgcaagtccacgacgaaatggacggctccgtccagtcgccggaggaagccgaggctatggccgaaatcatgcgcacctgcaccccgctgaccgttccgtctaaggtcgacgtggagttgggcgcttcctggggagaatcgatgtcatgatgcctgtcacctgcaagagctgcgaacttcgctacctcgaccacctgagccactgcccagggtgtgacacgcccagggtcgagcagacccgccaggagaagtgggacctccgcttcatggagctggcgaaacactacgccgggtggagcaaggatccatccacccagatcggggctgtcgtcgttgacagcctcaaccgccagcttgggcagggctacaacgggttccctcgcggggtgaacgacgacccagagcggtatgccaaccgcgaggagaagtatcccctggtggtgcacgccgagctcaacgccatcctcaactgcacgctctctccgcgtggagcgaccctctacgtgtaccctctgccgccctgcccggagtgcaccaaggctatcatccagtccggcatcaagcgggtggtgatctccagcgattgcgatcgaccagagtggatgcaagcgttccggcgtcacagcaaggtgatgctcgacgaggccggggtgggggtgtccattgtctgaacagaacatgtggggaacggtccgccagaagatggcgggcctggacccggttcgtgtggaaaacccggcggatcccggcacccctgacgtgaactacgtagagggctggatcgagctgaagcaggtggatcagtggcccaagcgggccgctactcccctgcgcgtaccacacttcaccgctcaacaacgggtgtggctccgccgacgtgtcatgtctggtggccgcgccttcgtcctgatcaaggtggcgagggactggctcctcctgcgaggggatgtcgccgcccgtcacttgggcaacgtgccgaaagaggagctgattgctttttcgcttgctttctggcctaattccctccctgaggaggagttccgaacatggttgaagacctacaactttcaaggtccgagcgactgctaatttggcgtcgccgggccgggctgcggcaggaggaagccgcagctcagcacggtgttagtcaccgtcgctatggccgctgggagcggggcgttgaggagccggacaccgacaagtcggtcggtatcctcgacgtgtacgaaaagctgttcatactgcgccgtcgcgaaggtgtgtcccagcaggagatcgcaaacgaacttggctgcaccagggcctgggtccagatgatggaaacaggtgagagcagctccgaacaactacagaactactggaagggccgtgcaaatgcaagctgacatccagatgtccgtcgccttcctccagcggttccaccccaacggaccctgggcgctaacggccatctcacccgacaagaaggctatccagacccgctccttccgaccagggcaggaggatgcgctgaaggcgtggttgggcaagaacgtcggcgagatgaacgtgtacttccacgtcaacttgcccatgggcgacatcagcaagaaggccgaaaagaccgacatcgaagccatgtgctggctccacatcgacatcgaccctcgggccggtgaggacatcgaagaggagcgggctcgggccttccgcatgctggaccagcacaagccccgccccacggtcatcatcgactccggcggtggctaccagggcttctggaagctcgacgagtgcatcccggtcaacggcgacctcatggccgctgaagacgccgaacgctacaacatccacctggagcgcatcttcggggcagacaactgccataacgtcgaccgcatcatgcgcctgccgggcaccatcaacctgcccgacgccaagaagcggaagaagggtcgcgtcaaggccctggccaccctggtcgagttcaacgacctgtcctacccactccgggagttcacgcctgcgcccaaggtgcagaccgcggacgagactggctttgcctcgggcaagacggtgcgtgtcagcggaaacgtcgagcgcctcgactctgtcgacgacctcgacaagtgggaagtgccggactggctgaaggtgctcatcgtccagggcaaggatccagacgagccccacaagtacgccagccgttccgaggcgctgttcgcctgctcctgcgagctggtgcgccggggcgtgccggacgacgtcatcttctcggtcctgaccgacgagtccttcggcattgccgagtcggtggtggagcacaagcgtcctgagaagtacgccatgcgccagatcgagcgggctcacgaagacgctatcgacccgatgctccgccagctgaacgagaagcacgcggtcatcggcgacatgggcggcaagtgccgcatcatcagcgaggtcttcgacccggccatgaagcgccacaagatcagccgccagtccttcgaggacttcaagaaccgctaccgtcacatcaaggtccaggttggcgacgacggcaaggggaacccgatcctcaaggctgcaggctcctggtgggtcgaccacccgaaccgccgacagtacgagaccatcgtgttcgcccctgggcacgagctgccggacgcctataacctgtggaagggcttcgcggtggacgccatccccggcgacaagcacctgaacttcctggagcacatccggaagaacatctgctccggcgacgaagacctctacaagtacatgatcggctggttcgctcgagccgtccaggagccggacagcccaggcgaggtcgctgtggtcctccgaggcaagatgggtactggtaagtcattcgtggtcaaggtgttcgggaacctgtttgggcgtcacttcatgcaggtctcggatccgaagcacctcgtgggctcgttcaacgcccacctccgcgactgcgtggtcctgttcggcgacgaggcgttctacgccggagacaagaagcacgagtcgatcctcaagaccctgatcaccgaagaagtcatcgtggtggaaggcaagggcgtagacgcggaagcggccccaaactacgtccacctgctcatggcctccaacagcgactgggtggtccctgccggcccggaggagcgccgctacctcgtcatcgacgttagcgccgaccggatgcaggaccgcgaatacttcaaggccctgcggaaggaaatggacgaaggcggctcggagaacctgctgcacttcctcatgacctacgacctgtccgagtacgaggtccgggcggtgcccaagacccaggcgcttcaagaccagaagatgatgtcgctctccccggagcagcagtggtggtatgagaagctccactacggcaggctcatgggcgagcacaccaagtgggagccggaggttcagcagaaggagctccaggaggactacctcgcgttcatgcagaagctgggcgtgtatcgcaagatgtccaacgtcgccctgggcaagttcctccagaaggtctgccctccaggctacccgaagtcctaccagaagcgggctgagatggtggagtacacgccggacggcttcgcgatcaagaagatgggacgcccgtacttctacgagctgccggggctcgacatcctgcgcaagacgtgggacgagaacttcggcgggccttacccgtgggagccaatcaacgagggcaaggaagacgcccaggaagacaagaacccgttctgatgatgacgtctatcaacaacgagcaacggagagacgtgctggtgcggctggggtggaacccagtcgctgtgcgccgactcggacccgaggagcttgcccaggccctgaaccgcgcctgggcggagcgccctctccgggttgagttcgaagcattacgtcaacttggtcatgcttttgaacaatccgaaatatctgacttgccaagacaccgaactttcgaccagaatggcggtcgttcccacgaaggaacttctgccaagaacttagaaacggagtaaagaagaatgaacgcagcaaacaacctgttcaagacccaactggaaggtgaaaccctggccgctgctctcgagctgcgcgagcacagcaagcgcctgggcgacgaggtcaacccgctggttgagcaacacaaggccctcctcaagcagctcaacgagcttgaggcccagatcgaccagaagcatgaggcgtttgacaccgcccgcgtggccttcttcgaagggctggaagtatccctgggtcacgacctggacgcaacctccctggaatacgctgacaacggcgctgtgtacgtccagcgcacccaggaagacctcgaccggaaggccgctatggcctcgctccaaggcggcaacccgctggctgccctggcggctgcgctgggcgctgcacgggccgaggacggcgctctcgacctcgagaacctggaagcatgcaacaaccccgactgccaggcctgcggcccactgcgcagcgtccactaactccgtttccacccacttcgagccccggttgccggggctccactgttttcgaggtactctcaaatgtccaataccaatccgctcctcctcgtccgtgacttcaccctcgccttcggccaagaatggaaggaggagcccggcctgcccacgccgcgcaccgccatgctccgtgttcagctggtcatggaagagatcggggaactggcccacgcgctggccgctgctgacaaggtcgaggcggtcgacgccctgaccgacatcgactatgtgacctacggctgcatgggcgcgttcggcacccacagccccgtcgcccacaccctgacaccgtccatggccctgccccgcgcctggggagaccttgacatgtccggccaactcgccgtgttccatgagatcgcgaagctggccaacgtcgccaccatgggcatgtcgatggcgttcttcccggacgaccacaagagccggaacggcctgcagagcctcaccttcgcccttccgctcatcctccaggcgaccgccaatgcttggtcggtcctgggcctcatgccgtaccgcgaggctgccttcctggaagttcagcgggccaacatgtccaagctgggcgaagacggcaagcctatcctgaacgaagccggtcgcgtcgtgaagggtccgaactacgtcgctccggaccttgcccgcgtcgtggctgaaattgacaaccagctggcgctcgaagtcgcgctggccaagtccactgaagaagaggagattgcccatggcaacgcctgagatggaagttcgcctcgtcgagcaattgcgtggcgacttcaagatcgtcgtgtaccttcgctcgcgccggatgagccacatccgcaccctgggcgagctgaacccggctgccgcccacagcgcacctgacctgatccacaaggtcggcatccttgctggtgccgtggccgagcgccagggccggaactacggcgacaaccacgatccggacgagtgctaccgcatcgcgacggagctcttcaaggaggccatgctggaatacgcccagcggaagcctgacctgcgtctcgccgtacagaagatcgttcgcgatcccgagaaccacatcggccagaccgcccacgtttcggccaccacaaaggggtgatccatggcaaaggcgaatgaacctgtcggtgaagtggtcgtcaagctgatcatcggagacgagtaccaggaggtgactgtcccggtggtcgccttcgtcggaaagctggccgtccacgaaacgattgcggaccatcgcctcgccgaggcgaagtcggcagccttcagcgtgacgcacaccaccaccggcctcgggctggtgaacggggtgtccaccaagaagctcgccctcgcctttgcggaggaggcgctcgccgctgcggaggagcacggcctggacctgggcgttgcaacgcaggagcagctgctccagcagcaaccggcctactccatgtggctcatgtgggcgctcgcggcgcgggccgagctcaagacacgaaagggcttcctgtatgaagagtaagctggcctggattgtcagcgccggggaatgcgacacggacgacgagtgcgcctgtgtcgtgttcgcgccggacgacgagagctcgatccagattgggttccgcgcccttgggctggaggaccaggaaggctgctcgacctcccgagcgcccgagttcgacgcctgggcagcccagggcgaagttccgcccagggtgctgctggagcacggctggttcatcggctgtcatgggtgtgggagctgcatccaccaggacgatggagacgccaccgagaaggtcatcgaacacgggagcttcttgttctgttcgaaggagtgtcaggcggagcagatcgccgaggtcatgaaggtgaacgcagccttcgaggagttccaggaggaggtgaaggcccggtggcctgggctcaccttcactggcttcgagggcggctggcccatcctaacaccgttcggaaggttcacgttcccaggctcgctatacggcgggggcagggtccggaagaccagggacgggaagctggagctggctgtggcagccggagacatgaaagcctgggagctttggagctcccaggccgacaagtcttctgaggtcggaggttaggcgctttgacggcgctcttcttggcggcgacggcgctcaacaccgtcccaaacgggagcagcgtcgttgctgggctgcttcatgcgggctgccggcttacgaacgtcggcgactacgtgttcgcactggaacttgcccttggcgagacgctgaaccgggacgcccttccggcgcaggcggtcgataaccgagcgagcttggcgctcttccatctcaagacggtcacacagggtaggcacatcaacaccacgcttgcgctccagcagacggagggctttggcttcagcgacgctcaggtttgcgatcttttccatggtaaggctccatttctatcaaggttgattaggcgagacatcttactccgcgaaccagggggaaccgtttccacccttggtgagcatcatcttagtgcttcggaggcagaaggcaagcgttttatgcaaaactatttacttcggtctccggctgggctctgcgaacgaactcagcacccagcgaaggagtagacccatgaaagtgcatcgagttcggttgacctctgaggaaggcttctacgagaagtgcagcctcctggccgtaggccctccgaatgagcggggcatgtgccctatctataaactgccccggcgcgacctatctaaagagaaggcggaggagctcatggccaaaatcctcaccactgggcagttcgacccggccaactgggagttcgcccaggagtacgacgccggcaaaatactttgacaaaggcgcttgcccatcttcgacgttgggcccatgatctgcttacaccggggcggtcccggaaacttagaaaaggagagtcaccatggcccgcaatgtttccttctacgtagaacgcgccaacgaagcctttgaaaagggcttcaccagcaaggctggccagaaggctgcgatggactccgtgaccaaggcttacgagctgctccgcgccgagatcaccactcttgtcctgggcatcgagcacagcgagcgcaccgaagcccacagcaacgtctactgggacctgccgagctacccccaccagtggaaggccaagcaccgcgaactggccacctccgtcttccctcaaactgcctccatctgcgaccagatcgaagagctggtggcgctgcgtcaggccctgaaggacgccccggtcgtcaagcaggagcgccaggaagatgagcgcgttaccctggtccagagcaccatccgcgacatgatggagaagcgcaaggctcagtacgctaggggcctggagctgcacgacatcttcggcggcctcccggtccacgcaaatgtccacctcgtgaccaaccagcacggcaccaccttcctccgggccttctatttcatggacgacaagctaaccccgctgagcgtgatcctggccgtgctccagaccaaggcggacgaggccaagtaagagacgattgccgggctcttcggagcccgcgcatactaaccacacaacccagaaacggagcaccacccgtgaaacacgatactcgcgaggcctggctgaaggccgcaaccgccctgctcgacaaggagttcttcgagggccggggctacaagctccccgagaagatccaggtcgccgttgggttcccctaccgcgcctccaaggccatcggccagtgcttctccccagacgtcacgaccgacgagaccacccacatcttcatctgcccgtccatgggcgacgccctccaggttctggccacccacctgcacgagctcatccacgcagccgtgggcatcaaggaaggccaccgcgggctcttcgccaagctggcgcgagagttcggcctccagggtaagctgaccgccacctacgctgaggaaggctcggagctctggacgcgcctctgcaacatccaggcggagctggggccttaccctcactcggccatgaagaagacccagcggcctcgcgggcaggcccagggtggctgggtccgcatgttctccccggacaacccggcctacaaggcgctggtctctccgaagatgctggaagagttcggcccgccgctggacccgtggggtaacgagatgcgcccggtaggagagcagtgatgcagaagccgttcctcgtcaagggcctgggctggcccaccacctggggcaagggcctgaccatggagaaggccatcaaggcttccgggctgccgtcgggcgacccggtccaggtctggctggtcaatccccaggcggagatcaacgaccagggagagctggtagccacgtccgccgagcacattggctccggcgagatcagcgccgaccgacgctctgtcaagatcatgcaccaaggcaggggggagctgtcagttccgagcgaaaattccttgcccaagcccatcgaaccaagcaagattcgctcaggcaatgagccgacccaaccacctacctctgaaacagggaacatcgaaatgtccgagaatactgaagccaagacccgcgccccgaaagccttccgcctggaagctgctgagaacgccaaagctccggctgccggctccaagcgccacaccgcttacgagctgatcgcccgccccgaaggcgccaccatcgagcagatcatggaagcgaccggctggaacaagcgcaacgccaccgaaggtgtccgcctgctgaacaagcacaacggcctgggcctcgtcggcgacgaagccggtgtgatcaagctgatctaagatcggcctgatagaaaagccctctccggagggctttcttccaatagaaaaggagcaacacccatggcgttcaagcccatgctcgcagcgacgctcgagccctccgaagtacacaagatcaagttccccgtgctggtctccccgaagctcgacggcatccgctgtctggtccgcgagggcaaggccgttacccgttccctgaagcccgtcccgaacgagcacatccggctgatgctggagcgccccgacctggaaggcttcgacggcgagctggccgttgggccgctcaccgcgcctgacctctacaacaagacgaactccggtgtcatgtcccgctctgggcagccggacttctgctaccatgtctttgacatgcacaacctcccgacgaccggcttccgagagcgccacctcgaagtgcgggcgtccctgccttccaccccgctggtgcaggtggtcgagcacaagctggtcgagagccccgaggagctcctggaggctgaggcggagtacaccgcagccggttacgagggcatgatgggccgcagcctggagggcctctacaagcagggccgctccaccctgaaccagggctggctgtggaagctcaagcggttcctggacgccgaagctgtcatcattggctacgaggagctctattcgaaccagaacgaggctaaggtcaacgccctgggccacaccgagcggtccagtcacaaggccaacctagtgcccatgggcgtcctgggcgctctgcactgccggactccggaaggagtcgagttctccatcggctccggcttcaccatggcggagcgggcctcgctctggatcatccgggacacactccctgggcaactggccaagtacaagttcttcgcggtcggtgtcaaggtcgctcccaggttcccgacctggaagggtcttcgttctccgcttgacatgtgatgaatttggcgaagggcgcttgccttatgctcgctcttcgccaacaattcgctcatcacgaattaggagctcgccatgaaatccactcttctcttctctgctgccgttgccgccctgacctggggcatcatcacctcggtctgtgctgccctggacgctccggacgttcacatctcctacacaaccaagaagtgcgttcggatcattgacgagaacggcgagcgcccctgcccgaaggaactgcctgccaagtaccatcgggtgtgggtcgagtaagcccgccaacacagcagaaacggagtaacagaaatgcttgacaagatctacgagctcccgctcagccgaacctacgtccgccactggggcgtcgtggaggctgttcgagagctgttccagaacgccctcgacagcgactcgccgttcgagtacacagtcggccccgactccctgagcatcaccagccgctttgcgcgcctggagcccaagacgctcctcctgggcaccacctccaaggccgacgccaaggacaagatcggctccttcggcgagggctacaagatcgcgctgctggtgctgacccgcgagggcatcaaggtcaccgtcctgaaccacgaccgcaagtggactccagagttccgccggtcgcgtcagttcgacgacgaggtcctagcgatccgagacagctcgtacccggagaaccggggccagggcctgaccttcctgctggagggcctctcgcaggccgacctggaggctatccacgactccaacctgcacatgtggagctccgtgggcgaggtcgacaacacctcccgtgggcagatcctccacgaccacccaggcaagctctacgtcaacggcctcttcgtctgcaagacagagctgaagtacggctacagcatgaagcccgagttcctccggctggagcgcgaccgccagacggtgagcaccttcgacctgaagttccacgccaaggacatgtggttcgagacccggaaggccgactcggtcagccagatgatcgcggacaatgttcctgacatggagtacgccaactacggcactcctgacatcgtcaaggaagcctgctaccggctcttcctccagaaccacccagactccgtggtcgccagctctcagcaagagctcgagcacatggtggcccagggtatggagcgtgtggtcgtggtcaaccagaccttcgccgagatcgtcaagacctcttccggctacacggcggggccgctggtcgttctgcgcagcccgtgccaagtcatggaagactggttctcccagaaccgccgccacatgcggaaggacggcatcatcgccttccgtgaactcatcgaccaatccaagcaatggaaactgaaatgactcagctgataccgaaggacaaagaacccgccaccgtccgcgtgggcggcactgccccggcggagcgcatcccgaccgcgatggagctggcgctccagaaggccaagcagaagaaagacggcctcaaggccgctggctacgccgaagcctacggcgctagcaagaagcgcgtgaaggaaatgaagaaggaggcccgtcgtggctaagtgccagggctggaccaagcccaacggtggagcccgcaagttccactacttcatggagggcgacccccggtcgctctgccagaagttgatgatcctgcggcccgaccctgaagcgttcgaggacgctcaccacgaccacaaagagaactgcgcggcctgccgcaaagagctctatcgtcgactggagaaggaagatgattgacttcatgatcattggcctgccccgctccggcaccacctgggcgtcgaactggctgacaacggacgcgatccactgcgttcacgacccgttgtacaccgagcactactcggactgggacgagcgcctgcccgccctggcccctgctggtgccgtggtcggcgtctcctgcaccggcatctggcgctgggctgactgggtcaacgctcacccggcgcggaaggtcatcctccaccgtgacccggacgagatccgcaagtcgatggctgagatcggcatgcctggacacatcggcgacgccgagctggaagcccttgacagcgtcatcggcctgcacgttccccactccgacctgttcgacaccgagcacgcggaggagatctggaagcacctcgtccctgggcagccgttcaacgcccatcggcaccgggcgctggtgcaggtcgaaatgcaaccccaattctctggtctgtcagtcggcccagaggtaatgcgaaggctgctcaacgaacttgagcgaatctaaggagtgacaccatgaaacgaaccgcctcgatgcgtgccctggccatcgctgcaatgatgggcctcggctccgtcctgcccttcgggcagacctccctctccgagcgccgtgggccgggctacgagcgcctagtgcgcagccgccctgagcgttccccggaagagtcccaggcacgcctctctgccgccgaggcgaagcgcgagcgccgtcgccagcgcaacctccgcctggaggcccgccagccatgatgaacgcctacgccatcatgtactggaccggcgtcttcacctacgtggtcagtgtcctcccgaccctcgcgctggtgctgtggttcgggatcaaggtcgtcgacctcatgggcaaccggctgtggaagaagctgcgtgcgtaccacgacctgaaggttctccaagaggagcttcgtcggctcgagtatcaaggcaagctctggaagaagcccgagccgccgaagtttgatatcgaggatgaggacgactagccgtccagcggcacgtgccgtgggctgccgctccgctggataataccctccttgacaaccggggagggtgcatcatgaaaccgagttactgtgaaatgcagaagaagttgatcgacctcctggagagcctcccttgtggcggaaccctggaggaactggtgaacggtctgaactccaacgcgagcgagctgcgccggttgatcctgcctctctgttacgctgggcgaatctccgtcaccccctaccgccacccgtccaacgggagagcgacctacctgttcaaacttaggaagcgagaatgaaacgaccgaacgcatacgtctttgacaccgaaacgaccggcatgaaggagccggtcgttgttgaatccggcctcctggccgtcgccttcaacgagcacggggcgctccgccccttgtggaccgacccccaggtcgaacgcttcaaccccggcaagcccatcgagtgcggtgcctgggcgacacacttcatctccaacgcggacgtggagaacgcccagcccgcttccgagttcgccctgcccgaaggcaccgaatacatcatcggccacaacgtcgactacgactgggaagtcatcggcaagcccgacgtcaagcgcatctgcaccctcgccctggctcgccagctctggcccgacgccgactcccacaagcagctcgccctcgtctacatgctgtcgcccagtcgggctgctggctgggctaagggtgcccacagcgccggtgccgacgttcagatgtgcggcttcatcctctgggcagtctgccacgagctgggcatcaagtcgatggaggagctctgggaagcctccgaacgggctcgcatcccaacgcacatgcccttcggcaagcacaagggtatgctgattgccgaacttccttcggactatgtaaagtggcttcgtcggcaaacagacgtcgacccctatctcatgatcgcccttggaggcaagtgatggacaacatagaaaaggagccagccccggcgcaggatgagcgggaggcggtggagcggttcagcccgacgaccagcgtgccgcattgcgggcgcgcctctgaggttgaggcgtacatgaccgatgatgacgacggggagtatatggccgtcgcccagcacgaacgcatcgtcgcagcactcacccgccccgcgcagaccgagcagcagcccatccggctgcctgaacgtaagcgcaccgatcacctgccgaaagaatacaagaccatgtccgtggttcgggctggccttgaggcgtataaccgcgcactcgacgacgtggccgcattgaacgccgcccccatcgcgcagaccgatccctgggcaccctcgggtggggactacgatcgctccatccacgcgaacccggacgccaaggcgtgggccgatttcttcgtgaagacgttccctggacaggctgacgagcacgacctcttgctgggctggttcgccaacgcaatgatggcgatgcacgaccgcctgcgccagggcaccacggtccaccgcctcgagaacgacgagcgcgtcgtgaccttccgggtgaacgctgagacgaaggacgccgtgttcgatcgcgtcatgaagttcttcgaggagcaggaccagttctccggcgaaggcatccaccagagcgacaactgcctgatcgaggccccgagcgtcctgtcggacatcgccgacaagatcctgaagttcaacgtcaaccacaaggaggagtgacatgacgagcaagacctttgttcctgacatgccgctgcgctaccgccgccttgggctgtcctgcccaaggacttgcgatgtgtgcggcctgcctcggggctccaggaaggtgaaccacagcaagtgctccaagattcgccagcagaggccgaactgatgccctgcccgaactgcggagaggacatggaaggcgacggcttcaaggtcgttcgccactgccccaactacgaagaccactgggacaaggagccggacgctgggccgttccactgttccgaggagaagcaagatgaagaagacccttcgcggcctgaagcgtaaggtcgccccggacggacgctacgtcctcctgcacaagtggaagaccgagcacggccaccggctggtgcgcatctggtccggcgagtgggactgctactggagacccagccgagcaggctacaccaccgatgtcgcccaggcgggcatctaccgtctcgacgacgccatcgacgcctctggacattgcggcccggagaagaagatcgtctacgagttcctgcccaagaacaccaagcagatcccgactcaggagagcgcgggcgacccacagctgatgctgaagtgcctgggcgaaccgcgatgacccgcccagaggaagtgcttagccgcgaggccgagggtaatgtgacccgattcgatgctgcaccgcgcctctacaacgctcggaaggtcgggacgatggtccaggggcctgtctacattggccgaccgtcggagtggggcaatcccttcgaggtgggccgcgacggcacgcgagaggaggtcatccagaagcaccgcgagtggttcctgggccagcctgagctcgttgagcgagcaaggcgagagctccgtgggcgagacctcttgtgctggtgcgcaccgcgcaagtgccatggcgaagtgctgctggaggtggcgaatgaagctgctactgctgaaggctaacctcctgctggcgttctccgccctcggctgggctttctgggagatagcgcgatgggcgatgtggtaacgtgtccgaagtgtggacaaacgtccgggaactcctggtcgcagtgcgaaggacgctgtcccatgagcgtgtcgccgtggttcgatccgacgcttgactatggaccttcgacgttggacagaggacaacggacggtggacctgggagctgcacacaacacacgagttggagaaactgagacgccatcgcgagaggttcgccaaccttgacacatcggccttgcctcttcgttcgcctccagcgaccatgagcgcctaacgaaccacgagggccgaatcatgacttgccagaaatgcggagccatcaacgatcgcaagaccagcaaacacacatccttcatcgtccagggtcgccgctgctgcggacactgtgggtcggtgatgggccgttccaccaaaactagctgacagaggtatctatgacaacgctgaacgacgcatccgccaacgacatcgtcgacgccattgggccgcgctccaaggctcgctactgggtccgcgacaaggaccgccgctgctccatcaccctgggcaaagaacccgccgaggagaacctccaggagggcttccgcgaggttactgccgaggagcaggacgccttccgggccgaaacacgtgcccacttcgctcacctactgaagtgaggtcgacatgagtgacattcttctcggcaatcgagcggtgctggtcgccgccagccacgccatccaggccgcagagcgggtcgaggagctccgtcgggagctggcccaggcagagtccttcctggttgctcgacgctgtgaggtggtcgacgagctggacgctctgagggcttgcgatccggacgcgtggcctgcccctgggctaacgtccctgcagatgggcgagtggcgcgtggacatccagccccggtactacgactgcacccagaagttcggcggggtggaggtctcgaagatcgtccccgagcagctgaccaacatcggagaggcgatcgcccagatcgaccggcaggtgggtgcggtcgtgcgggagaaccgggcgagcgaggggtgtcgctgcaaccccaagcagaaggaagcgtgtgcccgtgcgaggcacgctcgaccgaacgacccagtcgttgacggctgccgcaacgcctaggttcgcccgacttaggttgcccgagcccgactctagttggtttgacgaactagagtcgggtttttgcgttaaaagcctgtaaaaacaacaggttgcagcgcccgactctagatacttgagttactcagccctttttaaaacgctaggcttttgaggcccaggcgcgggatcaccgcctcgggaaggctctttttatactctctcttctctctaaagaaagtagagtaactagagtctcccctctaggaccctgtgggcatgcgggtcacagctgtctttagataaagcaaggtcatgtgagcaactagagtaacccgagtccagcggagcctccctgggcaggaagacaaggggcgttgcggtatcagtccaggggccttcgctcttgtctctaggcgctccgcgaaggaagattcacggcaaattgctgatggaccaaccaccatgactgacgaaaataaccgccacctcggagccaagcccggctctcagcgatacaccggcactggccgaaagttcaccgaggatcgttgggagatcttcctccaggcgttcgccaagacgggcctcgtcaacaagtccgcctgggcagccgacgttgtgccctcgacgatcacccagacccgcaagaagcatcccgagttcgaggagatgttccagctggcgctgtccgactaccgtgagtcgatcgagcaggagatccaccgccgtgccatcgaaggctgggacgagccggtgtaccagaagggcgagctcgtcggcactgtgcggcgctactccgaccggatgctggagctgaaggccaagcgccacatcgccgagtaccgcgacaaggtgaccgtcgaccagaccgttcgcggaggcgtgatggtcgtccctgggcaggctgccgatgccgatgcctgggagaaggagttcggcgagaaggcgcggggcaccacccgccatgagccaggagcggacgactgatggccgctgctgtcaagtgggaggttgacgcactaggcgggctccggcccgtcgttcgcgacggctccaacgtcatctacccggtgtgggcaccccaggagggtagccaacaggcgttcctcgcctgccccgtgttcgagaccctctacgagggaactcgaggcccagggaagacggacgccctgctcatggacttcgcccagcactgcggccagggcttcggggcagagtggcgaggaatcctcttccgccagacctatccccagctggtcgacttgatcaacaagtcgctgaagtggttcccgctgatgttccctgaggcgaagtacaacaagggtgaccacacgtggacgttcccggacggagagcagctcctccttcgccacatgaagtcgccctccgactattggaactatcacggccacgcctacccctggatcgggttcgaggaactgacaaactggcacgagccgacctgctacctgtcgatgatgtcgtgctcccgctcgaccgtccctggcatgcccaggaagttccgcgccaccacgaacccatatggtcctgggcacaactgggtgaagcgccggttccggctgcctcactaccgaggcaaggtcattcgcgactcgtaccgggacggtgacctggagccgccacgcgtcgccattcacggcaacatccacgagaaccggatcctgctccacgctgacccggactacatccagcgtattcgggctgcggcccggaacccggctgagctggcggcctggatcgacggttcctgggacgtcacctctggcggcatgttcgacgacatctgggactcccagcgacacatactcccggccttcgaccttaccaagatccctcgtggctggcgcatcgaccgctccttcgactggggctcgtccaagcccttcagcgtgggctggtgggccgagtccaatggcgagccgctcacgatcaacggcgtgacctatggccggaagcggggcgacctgattcgcatcgccgagtggtacggctggaacggcaaccggaacgagggcgtcaagatgctggcgaagaacatcgccatcggcatccgtgaccgggaggacgactggggcatcgccgggcgcgtcaagcctgggccagcggactcctcgatctacgacgaggagaacggcgtctcgatcgctcgggacatggagaaggagaaggtcttctgggagaaggccaacaagagcccaggttcgcggaagcagggctggcaggccatccggaggatgctcgaaggggctctcccgcccaaggctggcggcccgcgtgaggagccaggggtgttcatcctggcgaactgtcaacagttcatcgagaccgtgccttcgatccctcgggatgagaaagacccggacgacgtggacacaaccgccgaggaccacatcgcggacgagttccgctaccgagtcctggcagtacggaagacggtgaagagcggtgggttctgacggaaccctcttgctgttcctccgtcgcggcccgataatctagcgacccgtaggagacaaccatggattattgcacgttctggcctgaaggctggtggacctattgctgcaaggcccacgacgaggactatgccgctcaggtgggacaggccctggctgatggcagcctgttccagtgcgttgcctcctcggccccgaccccagctctggctgtgatagcctcgctcgtcggcggagtgatgtgggtgggagttcgagtgttcggctctcgcttctatcgcaaagctggcaccaccaacccaaccaaggatctctgacgatgagccaacaagccaagaaggaggcgaccccggcaacgccgagtagcgcctacgagtacatgaagcccgactgggacttggtcaacgccctcctgggcggaaccaaggccatgcgcgaagcgggcgagacctacctcccgaagcatcgccgcgaatacagcgacgactacaaggagcgcctcgagaccaacgtcctggtgaactacttcgagtggaccctggagggtctggtctccaagccgttcgctgaggctccgaagttcgacaaggtgccatcggagatcgagaagcacatggacgacatcgacctccagggtaacgacatcgtcgtgttcctccgcaactggttccgcgagggctacgccaaggcgttctcccacgtgctcatcgagttccccagggtgcaggcccgcgaggacggtcagccccggaccctggaagacgaccgcaaggacggcctgcgcccctactgggttcacgtctgcccggagaacatcgtgttcgcccatgctgagatgatcaacggggtcgagacgctgacccacgttcgcatcctcgaagaggagacggtggtcgacggttgggaggagaagacgattcagcgcatccgcgttctcgagcctgggcggacccagctgtggattgtcaaggacaagaaatggaccaaggaagacgagtgggaaactggcctggacttcgtgccgctggtcaccttctactccaacggtcgcgagtcggtcatgaaggccaagcccccgctgctcgacctcgctcacatgaacgtcacccactggcagagctcctccgaccagcgcaactgcctcaccgtggcccgcttcccgctcctggccggttccggcgtctcgagcgaggatgctgacgccctggtggtcggcccgaaccgtctgctgacgactacggcccccgacggcaagttctactacgtggagcacaccggcgcggccctgaccgctgggcagaaggacctggaagccctcgaagggcagatggcagcctacggcgcgacctacctgaaggagcagaccggcacccagacggccaccgcccgcgccctggactctgccgaggccatcagccctctcaaggctaccaccctggtcttcgcggacgccgttgagcaggcgctcgacatgcacgcggcctggatgaagctcgagtcgggtggtgaagtggagttcaacaccgagttcggcctgaccatgggcgaccaagccggtctggacgttctgttcaagactcgccaagccaaggacatcagccgttccgcctacctggacgaactgaagcgccgtgccctgctgaagggagacttcgacgctgaagccgaccaggagctgctggacgaagaggccgccaacggcatgccgagcctcgacctggatccggcccagccgaagaccgacccgaacgagccaccggcccctaaccaaccgcctgtgccgccgactggaggtgcccagtgatcgtgctgaagctgatgctcgcatggttggccgtttcgtttctcgtaggcatcctcctgggccggtgcatccggttcgggatgggagaggaaaaccaacatggcgaatgctaacgacaggctgttcgatctggcgcttcggcaccagatcgacctccgtcggttcactgtcggggagctgaagcgcattcttcggctcctcgagagcatcgacgcagaggtaacgaagaagctccggcgcgaccttgtggggctggccgacggcaccccgctgtcgttcactcccaaccaggagaagcgcctccaggccatcttcgctgatgtggcgctggtgcgcgaggccgggtggaagcaggtgaccggcgagacgacaaagtcgctggaggagctcgccgtcatcgaggccgatgtggagctcaagacgatcgagagcgcctcgccggtggtgctccagctgaccggcgttgaggtctcccagcttcgcgctgtggccgtctcccgaccgttccatggcaagctcctgggcgagtggttccagagcctggaggttgccgaccggcaacggctggagcaggcggtgcgccttgggctggcccagggtgagaaccttgacaccatcgtccgtcgagtggtcgggacgcgagcgaacaactacaaggacggggcgatgaccatcagtcggcggaatgccgaggccgtggtgcgaaccgccatcaaccacacgtccaacgtggcccgcgaagaggtctggagccggaacgcggacatcctggtcgggctgagggtgaccgccaccctggacgggcgcacgagcgccgtctgccgtgcgcgagacggacaatacgccccagtgggaagcaaccccctgcctccaggcgtggagcagctctcgccccctggagcgcgtcctccgttccatatcaactgccgtaccacgatggttcccatcctgggcggtgagcagatactcggtgagcgggcgacggtgaaggacacccggactcggaagacccgtgagaaggacttccgcgccgaggccagggaggcagccggagacaagtggaaggacatgtctgaggccgaccggcggaaggcggtggcccgcattcgggacaagtggtctcgggagaacatcggccatgagcctgaggcgacgaactacaacggatggctgaagaagcaacccgccgcgttccaggacgaagtcctcggggcggccaagggcaagctcttccgccagggcgggctggagctcaaccagtacgtcgatcggaacggcaacgaactgaccttggagcagctccggggtcgctatccagatgctttcgacaaggcagggctctgaaatggctgagatcatcaacttcgcaaaggcaaaggaagatcgcacgccccacgctagcggcccagcccgctgcctggagtgtggtcacgaatggcacgcgatcgcacccgtgggcaccacccagctggagtgctccgagtgcaagacgatgaagggcatcttcaagctgcccttcgccccgacggagagctacgtctgctcctgtggcaacgacctgttctacgcgacggagttcggtgtcttctgccccaagtgcggcgaggaagatgatcatctggcagacgacaactgacaacggaacgccccgaggcacggtatgctgaagggcgttgattcacttcccgaggccaccccatgaaacgacgcgagcagcgctacccacacaagcccgacgaatcccaagggctgaagatcaagcggttggtcaaggccaagacggccacccaggcgcagctcctggaagcactcgatgagactcccctcaccatcgccaccggcccagcgggcaccggcaagaccttcctcgcggtctacgcggctctgaaggccctgaccgacggtcgcgtgaacaaggtcgtactgacccggcccgtggtcgaggcgggagaggccctgggcttcctcccaggtgacctggaggacaagctccacccgtacctgatcccgctgatggacgcggtcaacgacctcgttgggccgaccatggccaagaagctccgggaagacgggatcatcgagatcgccccgctggcgttcatgcgcggacgcaccttcaacgactgcttcctggtcgctgacgagatgcaaaacgcgacgatcgcccagatgaagctgctggcgacccgcatgggcgagaacgcgaccttctcgctgaacggcgacccggcccagtgcgacctgcccttcaaggaggacaacggcatcgcctggatggccgagcggctgaagggtgtggaccaccgtgtcagcgtggtggagttccggggcggcgacatcgtccgctcggaaatggtgaagatgctcatgaagcacataggagactaagttggacaagtgcacgaacgtctgtggcctgacggtggccgctctgaaggaggccggcacgaccggcctggaggttcgccgcccgagcgggaaggtgctccaggtggtcctgtccgggaaggactacaccatcgaccagccgagcgaggaggagcctgggcacacggtgctggtcgaggtccactcctccctgggcgctctcaagaaggcgttgcgaaagtattgacacaaagttgttgtcgctcttcgatgggcctgacacaataggctcatcgaacggcgcgacgccgaaacagaaaaggagaagagtcatgaaggcatcagagatcatcaactgctccaccgccgaagaagttatcgaagctcgcgaactggtcgctagcctggaagccgagggctacagccgcgagttcatcgctaaagccaaggctgacctggcgattgtcgaaggtcataaccttcctttcgcttcctgccccgacgaagtcgagccaccctacaacgaagacggcatcaacgaagacggccagaacgtctttcacccaggcgcctactaaccaccccgccccggtccgccggggctcctcatttcagaaaaggagattcaccatgccacatcgtctcgtaaccttccgccctgccactcccgaagaggtctccgcctgggaggagctccgccgcaacttcctgagcgccctggcccagctggccgaccgcgatgtggagcgtgcccaggacctccaggaccgctacgacgacgagtgcgctcgccgtgggctgtcgttccgcctggagggcggtgagctccaggtccgcgtggtcgagcgcgtcaggcagcccgtcgcggcctgaagaagcccacctaggcgctctcgagaaggcattgcgaaagtattgtcgcaaagttgttgtcgctcttcgatgggactgacacaataggctcatcgaaacgaaacaccccagaaaaggagcgacacaatgacccgcgaatccatcactgccctgatgacccgcaagggcgacaccatcgaagttcgccaaaacggccagaccaaggtgttccacgtcctgggggtcgctctgctcggcaccaaggtctgcctggaggtgctccaggagaacggcctgactgggtacatcagtctcggggccagcgaccacgtagttcgctctgtcaaataatcgattgccttttgcctccgccccggcgaagatagtcttacgccggggcggtcccggtgcagaaatggagaaaatcatgaactacgaaactcttcaagccttcctcgctgagctgcttccagctgccgaagtcaagcccgctcgcgagatcgtcgctgactggttcggtgttgccgtcaccgtcggcgaccaaatggccaccatctacgcctgcgaagatatcaatggtcctggcgaacggggctggttggtcgaccacttctccgtcgctgagaacgacccgatggccttcgtccctgacgtctgggactttctcgacgaggctcgagctgtccaccacctgatcggttggtacatcaatcgggtgtgacggcccacggcccacggccccggaaacggggccacttgcccatcttcggagcggcaggcacacttgcccttcgacaataccaagaaatggagaacgacatgagcttcgcgccccacctcttcatcagcgtcggtgccactggtgccttctacaccctccgcgagacctacgaacatgagacctacatccggggcggaggtcccatgggaggtgccgtggtgaacggtgtctaccaggggcaggtccaccgtgaggtccgctccttgcaccacttcaacctgtcccagaacctggacgaggccatctcgaaggctgaggcgttcgccgagagcgccgggctggagctccgcttcgaccgcgacaccctgggcgcagaaatgcgcaccatcgagcgggcctccgccgaggctctcgagcgtcgcaagcgggagcaggaggagcgggaagcggcctgggctgcagagcgggaagcggcccaagcggagcggctggccatgctcgctaagggcatcttcccagtcggcccctacaggggcaaggagttcagggaagcgcccagggactacctaacgtggctgggccggggctacgaacgcttcgaggagggctccatcatgcgtaccctgggcctcgtcgttgcgttgaaagtaccagaactgctgctcccggagccgcaccccgagctccacctgggtgagcccaagaagcgcctcagcttccgggtgaccgtggtgcgtagcgcgtacttcgaccgccccgcctatggctcctacgatcgctacgagcgcgtatacgtgactacgatggtcgagtccgtgaccggagcctgcttggtggtcaagtcgcccagcttctcagcggagcccggtgcagagctcaccatcaagggcaccgtgaaggagcacaccgagtacaagggccaggcacagaccgtcctgcagcgcgtggttgttgagtgaggctattgtcctctgtcgaagttcgttagatcatctcagcgtcggtcgactgggccgacgcagaaatggagaaacaacgatgtccccgaaagagctcgaacgcggcctccgcttcctgctgaagaagcacaacgagggaggccgtaccaaggtgctgccccaccgccctcagcgtatcacgatcgtaatgtcctgccgcccggcggacggcatgggcttcagcgtggagttccgccacacggtcgccaccatctcaatgtttgacgcggagatccaggcccaccaggaggccaagcgccagggcctgcgccagccggtcatcctcgacaggatcatcgaataacagttgtcgaacgtcgaagcggggtccatactctgcttcgacttccccaaccagaaatggagacagcgatgttcagagttactgacacaagccccgccaaagccaagctgttcaagaccgccaagatcaagaaccgtatcggttcgatggtcgaggactccttcgtctctatccgctacctcagcaccgacatccacggcaacaatctgtactacgtcgtggacgccatgggtcgggaagagcgtgaagtcatggaaggcgatctcaaggacttctgcctgtaggaggcactgccatggtgtatgaagaatcagcaacaatggacgtggaactggaggacggtaccatcgaagtccgtccagctcagctggtcttcatgcaccagctggacggctctgcccggctggcccacgccgagccggaccactgcctggacacggagctggtgctctggtccataggcaatcccatccccaagattgtgaaggtagttccacatgaccaagataccgaacctggagttcactgtaacgctcgttgagccccatcaccgccgtgccctggcccagcggctgcgcgccgtagcggaggctctagaggccgaggaggcggagtgggtaagcggtggggccgtcctgcagcccatggaggacggggtgttccggctcgagtccaacctggagatcaagatagttcgcaaatagttgttgtccgtcttcgactctcaggagagtattctcctgtcggcaacgtcgccgaccccaagaaatggagaaacaagatgaccgtcatcaaattccccgccaagtcccacacctacgttggcgagatgatccgcctgcctcgccccgaagcgaagttctggaaggtctacaagattgtggatggcaaggcatacgcgaagcctgcaggcttcggtaccgacccgcgcgtcgcttgctgctaattcccgatcctgacacgcgaaggcccagggcgcttgtcctgggtcgaatccatatggatgattcatcctacccgtggagatcacgggaatcattgtgggtgagccacactaccaggagtcaacaatggatttcgaatttcaagaagtcgagtctctcgacaacgtccccgagcagttccgtggtctctacgctgaggccgacggcaagtacaagctgaacgatacctacaagggcgttgcggaagccgtgaccggcctcaaccgcagtctgaaggcttcccgcgctgaagccaaggcgttcaagggcaaggccgacctgtcccctctggccgagttcggcgaagaccccgccagcatcgcggaaactgtcaaggcccgcctccaggagctcgaaggccagctggctaacggcgacaaggccaagctcaacgtcgacaagatcaaagaagatctcgccaaggcgcattcgaaagatctcgagaaggtcaccaagcgttccgaagctctgcagacccagctgtacggcctgctggtggagaacgcagctaccaccgccatcgctgagctgaagggcgtcccagagctgctgatgccgttcgtcaagacccaggtcaacgtcctggaagaagacggcgagtatcgcgtgttcgtggtcgacggccagggtgatcgccgctactccggcgtcactgggcagcccatgtccatcaaggaactggttgctgagatgaaggccaacgagaagttcggtcgcctgttcgagagcgaagctccccagggtggcggcactcctccgggccagcgtcgcccagtgcagcagccacgcggtgagatgtccgctaccgacaagatcaaggcgggtctggccaagggccaagccgcttcgcgtggtggactgggccgtcgctgatcaagtaagccccaatcggggcttgcgctgttctctcgcctgagcgagaatctgcgtcacagcgagaaatcggcggcttaggtcgccggttcctcaaatggctctccggagggtgatccgcaggaggccgagtccgggtgacccggttgctactcttgttatcaatcgccaactgaaggagagatcccatggcatctgtaaccctggccgaatcggccaaactcgctctcgacgagctggtggctggcgtcatcgaaaacgtcatcaccgtgaaccgcatgttcgaagtcatcccgttcgacggcatctccggtaacgctctggcgtacaaccgcgagaacgtcctcggtaacgtccaggttgctggcgttgacgcgaccatcaccgccaaggcaccggcgaccttcaccaaggtcaccagcgaactgaccaccatcatcggcgacgccgaggtgaacggcctgatccaagccacccgctccagcgacggcaacgaccagaccgctgttcaggttgcgtccaaggcgaagagctgcggtcgtaagtaccaggacatgctgatcaacggcaccggcgcttccgacgagttcgaaggcatcatcaacctctgtgccgaaggccagaaggttgccaccggcgacaacggctccgcgctcagcttcgagatcctcgacgagctgatggatctggtcgtcgacaaggacggtcaagtcgactacctgaccatgcacgctcggaccctgcgttcctacaacgcactcctgcgcagcctgggcggtgcgtcgatcggcgacgtggtcactctgccttcgggcgctgaagttccggcttaccgtggcgtgccgatcttccgcaacgactacatcccgaccaaccagaccaagggcaccggcaccaacaccaccagcatcttcgctggtacgctggacgacggctctcgcacccacggtctggccggtctgaccgccgaggaagctgctggtatccgcgtcgaagacgttggtccggcggaagacaaggacaactacatcactcgcgtgaagtggtactgcggtctggctctcttctccgagaagggcctggcaatggcggacggtatcaccaactaaggtgatgcccgttctccggcagtagtccatccgaaggcgggccaggaaactggctcgcctttttaccatcgaggatagaatcatgaaagtgacacgcgtattcaagacggtcggcccgctggagggtcagaccatcgccctggctgggctccagttcgttgacggctatgctacctaccagggccagcacactgaagccgaccgcctgggcaagttcctccaccgcaactggcaggtcgtcgtagacaccggcgagaaggcccaggagctcactcctccgcccgcaccgcctgctcctgaggaagtgcccaacgccaaccagaccctgggcaacacccggctggcggaagctctgatgaagctggatccggagaaggacgaccactggaccaagctggacaagccagcaatgtccgctgtcgagcagatcttcggctctgctgacgtgacccgcgctgacgtggaggctgccatcgcaggcttcgatcgcaacgtggcccgcaagatggctgctgaaaaagcggctgagtaaggagagcgaagatggccttcaacgtccagaacgacaccggcaccatccaggacgccaacgcctatgtctccgtcgaggagttcaagtcgtttcagagcgaccgaggcggcaacatcagcgccttcaccgacgagcagatcgagaaggccatcgttcgcgccacagacttccttgacactcgctactccttcgttggagagcagtggcgactggagcagggcacccagttcccgcgccagctggccgaccgccccttctcgagctacgagaaggatcctcggagcggcctgccccgtgccctgaagcacgctacctgcctgctcgcaatgcgctccctgggcggcgctaagctcctcccggacccgacttacaaccctggtgggcaggtgacctccgtgaccaagaaggtggggccgatcgagacctccaccgacttcgcggaaccgacccccggtcaggccccggctgcgccgcagtacccggacgtcgacctgctcctgaagaacgccaagctcctgggctcctcgctcagccgccgcatcatgagaggttgacatggggctctacgaagaactgaaggctgacgccgacgccctgcttcaggagctgggtcaggaaatggtgctggtgcgcccagggacggggcagagccacgacccggtgaccggcgctgtctccaacgcacccgaccagcagttctacgccttcggtgtagagatcgagtacgaaaacaaggacgtggacggcacgatcgtgaaggttggcgacaagcgtgtgatcctccaggccgtcgagcccatccagacgggcgaccgcctccggtacgggctctctacctcgtggtccatcgttgggtggaaggccgtggccccggctgggctggcgctgatctacgagctccaggtgcgccggtaatggctcgcttcgaggatcaggtgcgccggttcggtcgaaccaccatggagcggatcgacaagacccgacgcgccagcaccctcgagctgtttcgactgatcatcgtcgagactcccgtggacgacggggtgcttcgcaacaactggcggacccaggtcaacggccccaacaccgactcgctggactcggaggaccagtcgggcgctcgggctctggcagaggccgctgccaacctgggcgagctgaaggataccgtgttcttcaccaacaacctcccctacgccgagcgtatcgaatacgacggctggagccggttcaaggctccccagggaatggtacgtaagaacgtcgtccgttgggacgacatagtggccgctaaggctcgggagtacatgtgatgagaaacagcaatatccgaagcgccctggtccaaggctacctcgccgctggcctagcgcacccgactgcgtacgagaacacgaagttcgaccagcccacagacaccccgtggtgctcggtctttatactgccgaaccagcctcgcgtcgcctccctgggcattggcggcacggacgagcacaccggcatcatgcaggtggatgtcaactacccaaccgaatcggggatgcaagacattctcgctgacgttgatgcggtggcggactactttaccgcaggaaggcgtctcgtctataatgcccaggaagtgatagtccgctcttgtggccgatccccaggtcgaaaggtggatggctggtatagaatcagtctcactatcgactggtatgctcaaacacctcgttcctaaaggagaattgtcatggctaacggctcccgccactcgatgcgactcgttccggaggtcgcctacggcgtcacccccgcgaaccccgcgttcacgcctatccgccacaccggcac

SEQ ID NO: 5 - DNA, 45036 bp, Pbunavirus EPa6
  source 1..45036: mol_type = genomic DNA; note = EPa6
ccccaggagtcccccagataaagtgggggtggcctatccccaggggtatagcccctagcccctccctaggataccatgagactaaccccaagatcaacccctagggataccgttcatcgggtggacccaagggtattcataagaaaaatcttagggtattcagggggtggatcggggggaatgatatttctttgataatcacatgatttacccgacgaacggtatgatagggttctataggtataccctaagactacccttcgtaggttgctggtaaggggtaagtggcatagggttcccttgatccaggttctataggtactccctgaggttgttccataggtatacccctagactacctctgtttgctatgtcctggcctattgcccctttatccagtaatataccaacaggtatcgggggttgcctttgatccagggcctataaccgggggtaccccaaaagtctattttatcctccggtgtatctggggaatatccccccaggagtcccccagataaagtgggggtggcctatccccaggggtatagcccctagcccctccctaggataccatgagactaaccccaagatcaacccctagggataccgttcatcgggtggacccaagggtattcataagaaaaatcttagggtattcagggggtggatcggggggaatatcccgtgatcccctattgacttccattgatccccctgttaatcaaagactgtctatatccgggggtttgctgggggactgatagtccatagactgtatgaaaaaccagtagacaaccccgtaaagaatatggcgtaatggcgccgccttgagggaaaccgataggcaccgggggaaaccccaggggcttgacaaaccccgcggaaccgggtctaatggcccccacgttctacctaggccaccatcccccttgccgcagtgctatccggggggctgccaactcaggaagagcgcccaagtcacccaagtgtaaggccggcaggcatcgggggttgacaagccaagcccaaggctctaacatgggcacccatcaggtgacggccacctggggaaagtgtaccttcgacggtccttggactgaacaggggagaaacccgaaagctgagggaatagcgcatactccgattagagcgctggctttgatggtcgctgccttatgacccatccgactggttgcctgctccagcgtaaacaattagcagagtccatggtggaatcgtgatggacagtatgttgggttagtataaatggcttagcgcagagggcgaagcttggtagatactggcgaaggtagggacgagtagacacgaagactcccaaggatagccagaggacagaccataacagtgatactaacgcggaaaggggccggctacgccaatgccaaggtttgccgactaacccctttatcgtatcgggatgcgtgtcccggctgatgattccaaaaggatgaaacgatgaacgctgctatcgataagaagctgcgccgcaaggctagtcgcaaggctcgtgcccaaggtctgaacattgggcaccttggcaaagctcagcagcgggcagaacagaagttcgggatcatttctaattgtaacaaaatcctggacagtaagtatgtttcacttcaggaaaaggctggagcacgcaagcgaaaggctctgatgaataccgattggcgtaatcgcgaggatactaagctgcgcaattggtacaagcctagcaagtgcaagaactcccccgtcacccacatcaaacccgaggtataagttatgagcgactacaagcgtatcaacggcatcatcaaaaccattgccaaccggggtgctgccctggacaagctgattcaaactaccggcctggacattctcaagcacatcgacgagcatggcgaggtgtccttggcctgcaagctgttcaaagcgattccgcaaggctcccgccggctggccctggcacactggttcgtagacaacggcaagatcgcggccaataccgacaaggaaaaggccaaggaattcccgttcgtcttcgccaaggacaaggctactcgactggagcgtgcagccgagaaaccctggttcaagtacaagaaagagcgtgacgtggccgacgagttctccctcgacgcggccatcgccgccttcaaggccaaggtacagcgcgccatcgacaagggccagctccaggcagcggatgagcgtatcgctatcatccaacgactggaagtcaaggacgaagcgaaggcagcgtaacggcggatgcgcctggggtgtgtactatgacgcgccccaggtctatccctagagtgcatggtaggtccgtgcattgtagcgatagaccatcaggaggtttccgtgggttactgtatctttgggcaggtccataccatccaaggccaggattatgtttctggtttctgcgatgcaagggtaggtttcgacgctggtattgtgtaccgctggacattcaaggacggtaagtttgcttgtggtgtctacactctggacggcatccgtctgagcatctgcgggtggatcaaatgaagtcaccctacgaagcggcccatgaacgtgcccaaatgattaatcgtctcaagaaactcactaggatgatccgggtgcatcccgatccccggtggattgttgagcgccaggaactcataaggaaacttagcaaatgaccatcgctatcatcgtatccagcatcggcatcgcatacttcttcttccgtgactggaaggaagagatgggtatcaactgacccaactgatgaggccatggtgattcctggccgaaacccccaccgaacctatggttgcaggctggggcgtcttgggaaatcaacaaaggaaactatcccgtgaaacgcaacgactatcgtaaggtcagccgcaacatgcaagccatcgaggctatcgaccgcaagattgctaaggtaactcgtgagttgaccaactccagcggcaatcaccttggtaaaaccctggagttgaacaagctccgtgccaagcgggcatccttggttaagaacagggcgcggtaatggcatggaagtatattgcatgtgccgccatacgctcacgttccaatgggttgttgctggtagcgtgggtggttctcttcgtcctgtcctcgaccttggacagcaccccttttgcatcgtgaggtagttgaggtgaggaccactaaagaattcaactgctacatggcgatagccacgatgataacgctcgggtttatgacatggttagtttatagccttctcaggagctgatggcaatggatatcaaaatctggccccgcaacggcgtaaccctcaacaacctggtcaaatcccaaacattcctcatcggtggggatgtgtacatggtctgcgaactccgcagcattaagatgaagggcgaatccgacgaggttcccgttctcaatctcaagactggcaacgtcatctacatgcctccggtgagcctggtatacccagtaactgccgagctgaattgctacgaggtgtaacatgaaactccaatacaatatgctcaccagtaagatccgggttgcctcttgggatgatctggagtcgggtcgtctgtacatccgccaggacgaggacggggctgcaaacccgcgtgtctttatgtacatggaagttgcagatgaattcttcatcgtggatatcttcggtgggcccgtgggtgccgtatacttcagcggcgatgttgactgcgggttctaccccgtgaccatcaaggctgcgtccatcgaagtccatcggttcggccctccggcctagggtgtgtactatgacgcccgccctgtatctattcctctggttggaatccttggtcagcatccgcaggttccagcctaaccccaaggcgtaccctggttggtacgtgacccacatccgtgtatctatcttcggcaaacgtgtaggtatcgtctatgaaatccactgaaccacaagtctattggttggccagtcccgatggtgaattccacctgaaggtcatcaacttcggccagttcatcaccgaaaccctttacgaactcggcattccggtggaccacaaggttcatcgggtccactgaggtgacccatgacaaacactaccttcactgtagcagcgtcccgcccccggaacgaccttcacatcagtaagcgggcggatggggtttatgtgaaccctaaaaactctggcgatattgtcttcctcaaggaaggtaataaggttgtcgtcctcagccagagcgggttcagcatcctcgaagcccagaccatgcccaacatcggggagctctacccggctaaggaggtccatgtatccgccaaggtgtggggaccgtatgaagagtaaaccaatgatcggccaaatcatggcccaggagcggcgaatgaatcgtcgagtagagaaacgagggttcaacatgacccatcaggaagtcacccaggagccccgtggtgagcttggtttcaccttggctgccgtaggtatggagtcgagccgatcggcttacctgcgccacgccagggaggccatgatccaatctggtgagccttgccctcattgtatgccagtcttcggtcccaaagagggccgttgttgcaactgttcgagggactggtgatggatctcggcaacttttggtgcctattgggtgtccatcggtacaaaatacttgatggtggaccctaccatcctccgccgcatgggcagccactacaacccctgggcctccagcgccaaccactcgacgaaggttcgggttcacgtcatcaacgtgcaagctgcggcggagatcctcatcaaccacggtgtcctcatccgccgactcggtggtttgcaggacttccccggtactgtcgagcactcggaatacctcgacaagctctgtaaaggtctgtaacatctaggccttgacattctgctgaaagtgtggtataataaccttaaggtgtccggggttgctttatatccctaggatacctaaggttctaaccttctatcttcttcatcttaagaaagaggtgagaacaatggtcctcaagctctacactcgggtaatgcttctggctatccccgcatgggtaagcatcctctgggtagtaccccagatgctgtcccccgctaacaccatggttaacgccatcggtgccggcctcctggtcctttccatcctgtactccctctgggctgtcagccatctgtactcctacgccggtaagctcactggcaagaagggggtgtagtatggccactgtaacaagaagtagtaaggggccaaggatccctctttacttcgaacgtaagcgcgattctcagatctatcttcgttcggaatcctggaaggacctcaccatcccgatggtaaacatctgcaatgggagtgtcctgtacctgcaccctcgggaactccccgtgtatttcgtggcgatacccgagggtgaaactctcaaggtgaaggtgtgatgtactatgacggaacagcagcgaggccgcctccgtaaggcaatccacatggatctggagggtataggcgaagatacctccgacctctacgacaacatacataagatagacggcctgctgggccacccaggtaagcccccgcatgattggggcttctatgtactgatgttcgtcatgttcattgccttgtgcatggtctacatcaccccccctcatcaccaataaggatatagcctatgaaagccaaagtcttctatgagcgactgaaaacctccggcgagctgaccctgaatggcggcatctacaaggccaccaaggttcctgcgccacacaagggtaagcagcagcgtcgcggccccttctaagagggcgttagtaatacccctaggaactccctgggggtattgctggctaactcaaccaaggagaaaacaaatggcccgtatcaagtatgccttcggtatgaaacccaagaatggcgagggtaaagccctcaaggtgatgacctcttcctcctgcttcggtaccatgggaggtcaggtaacccacggctataagctcgacggttggaccttcatctgctcccgccgaagcaagaagttcatcgatgtactcaacaagtgtacccaaggtgaactcaagaccatcaccatcggcggcaaggccttcaaaatcccgaaggtccacttctggtcttacgaaagcaagtccaagaattcccccttcgagaagtattctaacgggacggaaatgatttcccccacacatcacggaaaggaaggtgtctgcggtatctacttcaaccccaaggtacacaccctggattcctggtaccccatcatgaaattcctcttcaagatgatctccagcggactcgactaccaaggtcgtgaagaggaggttcacctgaagcttgctgagaagtatggcttctggaagtcctacctcgcaatgtccttccacggactgatagccaatggctacaccgggtacccactctccaactacatgttcagtagcgattgggatgatctcaagaagggggatatccacatccaatccgctgaagagtctatgcgattcggtcgttggatggccaatcgggatgccccaggtggacgtgagtgggtaaggagtacaccctggcggtctgaattcctgaagattcagttggacaaggtggagatggttaccatagaccctcagccaaccgttttcggaaagaaagacccctacatgaccgtagatagcgaggtgggaggtttcatccgcctttatcctcatacctgtgaaaaatacggagtggtcatgctggggatcatgggtgagattggctggagtcgtgacataaaggatatctcactggctctcgaagacttcatcgagaaaaacttctgacaaccaaggagaaatcaaatgggaatgtatgcagcccataatgtgtactataacgccgaagggtctgtggtacaccactactcggtcaagatgatggccgaacatacaaactgcttcgggtcctattgcgaccagacctccgccgttgggggcgaccggtgggttaccgggattggccacctgttggtgtctacccacgagaatacctctggtaaactggtggagttcctgaacagtgatctggtcaacaggattaccgacggtggtattctctcggcttccatcgactggcctactcgttggtgggattacactggtgatctcaagaatctcagtgatcccgaccacttctctcccccaggacgccggcaggcagtctatgtacgggtggacctcaggaagaacgcatcggccatcatttgtgccctccgaatgggcgatcgtctgtgggcaataggtgacgcattgcgtcgctatacccaggaaaaccgtgataaggtcctgggatgcaatgcagagatcctcaccctcgcggcttgtgcccaggtaggaagcactgctcactgcgacagctatcctgccatgttcccggtgactgccggtgaataccgggaaggatgcgaaagtcacggatgggaggtggacgacagctacataagcgaggtcatggatggtatcgtaggtgggtacaaggagatcacctacttcgatatcaagagcatccatggtcggactcgcgaagagttcaaggacaagctcaagcatcacaacgctgagttgtggcaagggtataccaaggacgattgcttgatcgaatacgacgggctagaaggtgtacctaatgaccgaatcctgtccatcatggccccaatcaccattgacgtaggtgacccaggtcgggaaaggtccgaggtcgtacccaccagccaatacagcatccccgaaatcctcgaaaaactggagaacatgcaatgaacaacgcaatccccctgatcggtgcagatcccgaagttttcgtcggctacgaccgtaatccccagagcgtcatcggcttcatcggtggaaccaaggaagaacccttggctgtatccggtggtgctgtccaggaagacaacgttcttctggagtacaacatcgacccggccagtaccaaggaagagttcgtggagcgtatcgtctccgttcgactccttggtgcccagatgctccaccccttcggcatgaacatcatcgagaacctgtcgtctcacctgtacgacgaggaactcctccgcagcttcggcccacaggcttacgtcttcggttgcgagccggactacaactgctggactcgtcgtcagaacgtgatgccgaaggatgcccctccgaccctgcgcactgctggcggccacgtccatatcggcttcagccacatcgagcgagtcaccaaggctaccacccgagaagtcatgcagatgtgtgactacctcctgggcctagcctctgtcatcctcgatggtgacacccagcgtaagaagctgtacggcaaggctggtgcaatgcgctataagccctacggcggcgagtaccgtagcctgtcgaacttctggatcttctctgtagacctgaccgagtgggtctatgaaatggcagtacaggcttacacctccaagcacctcctggaggagtacaagtccatcgtatctggcgatgaagtccagcgaatcatcaacgataacgacggcgctgcggcggtagctgcacttcaagcgctgggggtgaagtatgaatgacctgaataatcgccatcggttggccggggacttcaacatgtactactcctccacctatgccttcttccgggttgacggcgagcctcgggtagtgtacgtggacgataccgagtccattggtgacgaccgtcaattcgacgggtttcgtctcctgggtaatgtgtatcgccctgacggcagtaactactacggtggggttgtctacagcgaggtagaaagcgtgcggccctccagtgggtactatgacgtctttggccgtggggttcgtgatacttatgtatccttcctcgtgaacaatcggactcagcgtaagggtgtggaccccaggaacatcctgctgaaccatgctcaacaggccatcactggcgaaatgatgatccgaatcttcacccaggccgaggaaatgatctctgccccatcccaccgggacttcttcatcaaggatggggtagttcactggaagggggtgaaggttggtcagatggtagatggccgactgtccgcagatgaacaattcaagaaccaggaggacttgctatgtcagttattggcacacagatagggttccgtaagaaccagatcattgccccggaacatcacgaggaactgcctgcggttgcttccttcgggttcgaagtcgaactggaaggcctcaacaactggccggaagtggacgggtgggatctgaagggtgacggctctctgcgggatggtatggagtatgtcttctccggtcccgcctctggccagaaggcaatcactcgggttgaatcctttgtgagtgcgatggaggaaactcctccggcccccaccttccgttgctccacccacctgcacatggatatgcgggacgtagagtggccggtttatgaacgaacggtcctgacctacatggcattcgaggatgttttcttcgatcactgccagccgtatcgtcgggatagtaacttctgcatcccgttcttcagcaacgactggctggcccagaccttcggtcgccgtatcctggccccggaaggtgaccgagagaaagtcttgggtcttacctcctggccaaagtattcggccttgaacctccaggtaacccacaacttcgggtccatcgagttccgtggggcccatgctctcactactcggcaggaaatggtaggcctgatgcagcgtatgttgtgtctcaaggccttcgccatggctcacgcagaaaccccgctggaagagttcctcaaggtgctctccgaggtgaatctccgtgatgtattcttccttggggtatctccggactatgaaatgtctccgggtggtcgtgaaatggggatcgccagtgctactctcgcggtagcaaccatgggctttgttcgatccggggtagaccccctggaggatgaacagaaccgtcagcgtcgtctccgggagcaggaacgtgagcgccagcgggccttggatcgtaggctgctctttgctcgcgctattacctcacgactactagatggtgcagcagagcggtacaacttggcaatggtgccaggtacccaggttcgactggatacagcgatcactgcggtaacctctctgcgtcgtattggtcaccaagtgcgtgtacgagaccttctggaggaccaagaggttcttcaagatgccttcgtactgctcatggataacccgcagcaccttcagcgccataccggcgtaacaatcgaaccagatatgtactaaggagaaatacaatgtgtggattggtaggcttctgtgccacaactaacgcgagtgataacgaaatcgctcttctcaaatccctcctggccgtggatattatccgtggtgctcacgccaccggtttggccaagatcgacccggttaagaacgaggtaggaattcacaagcgggcagtagatgcctacgacttcctggctgatcctgaaaccaaggagttcctggacaagggtcgggctcgcatctacctgggtcacaaccgttacgccacgatgggcgacaagacggaccatgggaatgcccaccccttccaggtagaccacatcaccatggtacataacggtactgtagatacctggggcctgcacctgctggatggcaatgataagtacaacgtggattcgaacatgctgtgcgctaccattgccaaccacggtgccaagaagacgttcgaggagaagttctctggtgctgctgcggttgtctggtgggactccaaggaacgtagcctgaacttcatccgtaacgaggatcgtcctctgttcatggcggttaccaccaccgggaccatcgtatgggcatcggagcctgggatgctcaaggttttcctggagcgacccaacgctaagatccgcctgcgttctcccatcgctgaactgaaggctgaagtcctggtaactatcccgttcacggaggccggagtgcgaaagggtgcagaaccccagaccactccggttacatttctcgaccttcccatccccgaaagcgaaaggcaagcagcggcatggtggagtcgctacgtcggtgtctcggactacgatgactacagccgaagccaaggcagccaagcgggaacgaaaggcagccaagcgggctcgtcgtatggaacgtctggcgatgcgtacgcaaggaacaccctccggatcaacaacaacctcgacgcagcaggtagcaccttcaagcaccggcaactcgtcacctttgatgttgtcaagatcgaagcctacgcaaacggaagcgagtacggaactgtcactggaatcgagcgtgaagaaaaccttctcatcgaagctcatggcatcaacgtctccaaagtccacggatacaccgtcctccgaggtagtatctccaatgcctacttcatcggccaagaccgtgatctcaaggttactgtcgaggatctggcggtaagctgcctggacccaaagcatcggccgactcctggggagactaccccggttttgaggattgggacgatctcctcggagacgaaatcccattctaaacccagggttcaagtcggcggcacctcggggaatacccctccggccaacatcagctaccccttgaaggttcagggacacacgttcaacaacgtacatgtctttcgggacttcgtatcccaggggtgtgcatcctgcgggaagattccaaccgcatatgaccagcgtaatcgtcatctgacggtatacgaaggtgccaagttcactggtagcctggatgagtgtgagttcatctgtggcgagtgtgtaatcgaaaataaataggaggtcaaaatgacccaagtaacgatgaagcgtcaagtagtgatccagatggagaccgacgcaacccgaaagtatcctttctcccgtgacaccctggacaagatccagtcgattcgtcgagtcaaggagcaggaactcaatgatgccaacccggacgaggaattcctggtaccggccccggtagtcattgcggaagctatcgaccgactcttcgaagactacttcgagtaaggtagtgcgttagtaataacccctggccgacccatgccggttcctaagatgtgtacatgggatctgacttaggaattcaggggttattgctggcttcactactaccctcaacagaaacaggagatatgccatgttctacatctacaaaggttcccgagcttcttccggtgccgtaaatcttcgcaatgcccttggtgcccgaatccttcggtccgaggggtctacctaccgtggccgtgcgggtactgcggtaatcaactggggtaccgtaggtgcagaggctcaccgactccgggatattgcccctgtgttcctcaacgacccggcagttgtttatcgctgcgctaacaagctggagttcttccgccacttcgaggccaatgcccctcacttgattccccgctggaccgagcgctgggaagatgccttgggtgtactcaatatctctggtcgcatgtatgcacgtaccgatctgaacggccatagcggtcgtggtatccatctggtgtgtactgtcaatgatgcagaagttgctgcaatcgatgccctccgtagacagggccactacccggtacacatctacggtcacacccacatcccggatgttatcaccagggcacaactgttcacccagggaatcgtcggtaagcgtaccgagtttcgagcccatgtgatccgtggggaagtagtacttctccaagtcaagctccgccgtgttgccaatgaaatggtgaccaacgaaggacaaagcatcgttcgtaacgtagctggcggctgggtctacggggttaacgatgcaatggaccgtgatggtgctgagcaggctatgtcggcggcggcagaagcaatccaggtggctggactggacttcggtgcagtagatatcatcttccagcacgccactggccgggcctttgtcctggagatcaacaccgccccaggtctggacgctgaaggcagcgccctggaggcatacgtcaagggcttcaacaaaatcttcgaggagactatctaatggctgttcgtgttttcgtttatggtactctcctgtctggtttgtacaaccactaccttctggaaggggccgagtttgtcggcaatgctgtatcctgcgagcggggtctgatgtactccgctggcggcttccccatcctctccttcgcctcccgcgctgatctcattgtaggggaaatctggcaactccccgaaggtgagaagggggaggaaatgctggagaacttggatgccctggagggttatcctggttggtatgatcgtaccctcaaggatttccgaatcaatggggaacgaatcaaagccctggtgtaccatcaggatagccacatggcgttggatatcgtccaagatggcgactggaaggcacacctggcaaaacgacaaggagcagtataatgaatgaaatgaccgtagacaaagcagtagaagtctaccgcgataccccgaacaccttcggacaccaagagctacatgcccagaagatgctcctcaaggagatcctgggccttgtcgcctcccaacgacacctccaagattccatcgaggtctccaagatcccggaggcctcggatagtcccgagaccagctatggtgggtactgtgacgagtctgttggtattcgcttcatgtgggagcgactgaagaagatcgaggatcgactccgtgaactggagaaggtctacggtactttcgtaacaactccttacaagaccctgccgggtaacgtcaatgctgtaccgagcttggtactcaagagccagatggaggaataagtgaagcagatcatcggtgatacggcttgtccgggttgccgagctaaaggtggggataaaacaggtaatcacctcatcttgttcgtagacaaggagaaaggtacccgcttcggtagttgtaaccgttgcggccactatgaagttctcgaagaagggttcaaggttcctgaacgaagggagaaatccgaagaggatatcatccatgaagtcaacgaagtccttgagtatccaactaaagccctcgatactcggaagatcagcaaatcaatcgctgaacgatacggggtacgtgttggtctatcacaagaaaatggtgaggacgttatcgagcattactatccacgcacccgcgatggggagtaccgagcgtttaacgtccgaatcctagaccccaaggctttctactatcgtggtagccccaagggtggtgttgaccccttcggttataacacccttcggcataaggatatgggccacctgcggttagtcatctgcgaagatgaactgtcggctatgtctgtggcccagatcatggagtcgaaactcccggagaagtggaaacatcttcgtcaggcatccattagctggtcctcgggtgttggttctgctggacgggacattgcgttccttaaggagtctggtgtccttgagcggttcaacgaggtcatctattgccacgatgcggacgacgaaggccgtaagtcagtagaaaaggtacgtgccctataccccgagtgtaagtttgtcgagcttcctctgaaggacgctaatgatatgcttatgcgtaaccggggggatgaggtttaccagatgatacgtttcggcagcaaggtcaagtctccggactgttccgttactgtcgatgaggtatacgctgaggctctggaaccccccaagtggggcaagagttacccgtgggaaggtttaaccaacctaacctatggtcagcgggatggtgaaatcatcggggtaggtggaggtactggcatcggtaagaccctgttggcccacgagattgctgcctggaattgcattgagcacggggagaacgtagggacattcctgttggaagagcaggtagccatgacactgaagaatatcgcggggaaggtagctaacgtacccttccaccgaccggatatcgagtgggatgagcaagcctttaaagacgctgcgggtaaactccgtggcaagctcttcatgtggaagaacaagggtcagaacgattgggatcatatcaaggaatgtattcgcttctgggcagtagccatggatgtgaagactatcctgctggataacatgaccgccatgaccaaccatcttagtccttccgaaatgaacacggagatcgcccgtatctgtacagagcttgcaggtatggccgatgagttgggtcttcggatcttcatcttctcccaccttaacccgcccaagggtaatcgtacccacgaggagggcgctgaggtaaaggaaagccagttcaccggctcccgagctatgcagcgttggtgtcagcttatgatcggcttcgagcggaacaagcaggctgacggggaagagaagcacgagagcagaatccgtgtaatcaaggacaggaactacggtaatactggcctagtgtttaccaagtataacccagagacgggtcgcttggttgaacgtgagggcagttacgacgaggtacctgctgacgatgacaccccaatttgattacgttatctatgacctagagggggacggcctcttcaatacggtcacaaggctttggtgcgctgttgttgtagacattccgactggggtagtccggggattccggcccgaggaaatggatgtgttctataggatcatcgcccatgcaaagttcgtagtcggtcacaacatccttgactacgacaaccgggtccttgagaaacttcatgggattatcatacccccagatcgaagctatgacaccttggttgcatcgaggttgacttggccagataggccccagggtcattccctgggagcctggggtaagttcctgaagtgtcacaagggtgatttcaacgacttctccaagttctcagaggaaatgtttgagtattgccttcaggatggagtggtcagtcacgcactgttcaactacctcctccgggtactcggcatgacttggcaagagcttgttgaatggaggactgtagattggctaaaaagcgagtgaggaactacaagcgtgagagagaactggctattcgacgcggcgaaacgggcgtgggctctaagtcaggagatgctcagcgacaccgagcccgccgaaaggtggaaaagcgtcttggcaggaagctcggaaccgacgaggttgtcgatcatatcaaacgtgttaaagatggtggcggtaacggggattctaaccttcgcgtccgtggccgttcttctaacgctgctgatggtggtcgggtgggcgatcgtaaagccaaaggcattcgcaagaaaaagtaaatgaagaggggccttcgggcccccgaggactcactatgttcaatcgaaagcttagcatcagcaacatcctcagttccttcgacaaggtgctggttaacctgaagacctttatccaagagtcttcggaggaatctgaacggatctacaacgagatcagtctcctgaaggcggagcgtacccaggtcatgcaggacaatctgaaggcccagaaggtactggctaatctggaagaactgctgggaggtaagagtgaagaagtatcgagttaacgtggggttccaggacaccaaggtgttcaacgcagacttctaccgaatcgagttggatatcatcagattcttcgctggtgattccgatgccaaccccatgaccgtccgagctaacgagatcggtgctgtccgcggatgggtttctgtagaggagatcaatgatgaccagtaagaaggaaagcctggaagagcaggcgcttaaggagatcgccctggagaaggaattctctggtagctggggtggccccgagatcgacgctgatgacttccccttgggtagtgcctgcggcctagaccccgaggtgtgtgagtcatgtcaataaccctacaagtcctagtcatcttctggagtgcattcttccaggtatttctcctgggtctgaactctaaactccttcgggatgataagatcaaggctgggtttgtagtatcttggtgtatcacgctggctcagtttgcttacatcaaggcggtagcctcctcccacttggagatcggatggtttatcttcgtgtccgggtggggaggtgcccttgggattacctctgctcaatacttctacaggtggtacgacaaagtattccacaagaaggcttgacaaatccagaaaagtgtggtataataaccttaaggtgtccggggttgctttacccctataggagatacaaatgagtgaccatgtaagctattccaaacatgtccgtggtaagtacctgtgtaatatggcctctgccctccataagagtatggagatacaaaggactaacatccggaagttcctcagcagtccccaaattacccttcgggagaagcgtcgggtattcctgagcctccccgctggattcctgggggtgagctacttctcaggctcccacctggatctgagttcctactcgcctaaacgcaatagccgggtacgggagaaggatctgagcctgtacgacgacttctacatcgacaggaatacccagctagatccgcgagacctcttgtttacctcccaagaagagaagaaatgggagtttaaatacctgaaggagaagcggggtgatgggttcgagctatccgatgaagaactgagcgacgttaaggatatccagcgcaagattgacctgtcctggtacctggtagacctggcctgtgagcgtgggtgttcctacttcattttcgactggtgattacatgagcaagatcaagagtattctcatggagcggatagatgacttcctgctcaaacaagttgctgtagccttcctggagcagcaatggaagttggaccgcagtggtaccgtggactacctctcctacctggagggtgtatcccacgaagctgtggagacagttgtagagaatctggcggagcgtcttaagggggattaagtggattggagaaagtcactgttcgttgagcacaaggtagctgatatcatcagccgccagagtaaacgtggagtctacttccagactcagcgggccaagtggctgatccatgtgcttagcgaacgaatcctcaagattgaccttgaggctgtcccccagatgcccatgatgatcgtaagggctggggccttcagcaagccattcctaaagagtggtaagccgaaccaaaggctccagtccctgtggcaacgtcttgggcacttcgaggtatctggtcccttctctgcaatcgagtatgtacccttcgaccttggtaagactgccaagttcaaggactggatgctggatcagggatggatacctgaccaatggaacatcaaggatattactgtcggcactgatggcaagaagctacgtggatctgaccttaatgaatccttgaataagtacattgaggatctccgacagagcaaatctggacgactccgaatgaagctccaggggatcatccctgggaaaactaccattggggaagtcaagagaaagctcgaaaagcaacgtaaggtcctaacgactccgaagatgactgaagagtcgatggataccgtccagggagacctgggcaagctggtgatgcagcgaatggtttgggcccaccgtcggtccctcttgcaggggctggtagatcaggtgaggcctgatggacgcctagaggggagtgctaacccctgtgcaacacctacgggccgcatgaggcaccgtgtagtagtcaatatccccgctgctcgttctcctttcggacctgaaatccgagggttgttccaggggacacctgaggctggtgaatggaaatggactgtcctccgccgtgatcttggggagaacgaaagggttaggcccttcactaacatcgtggaggaactcaagaagggtaagtggaagactgtaggaaagtaccgggtatacgtcccagcgaatcaattggtattcgtgggctacgatggtgctggtctagagcttcggatgcttgcatcctacatcaacaacccagagtacaccaaagaggtggtcgagggtgatgtacacacggccaaccagatagccgcagggcttcccacacgggacgatgctaagacgttcatctacgccttcatctacggtgctggggatgccaagattgggactatcattggaggcaccagggcagacggggctagactccgggcccagttccttgaggctaaccctgaccttgctgcactgattgagagggttaagcaggaagccgagagaggttatctcgaagggctagacggacgaaagctaaccatgcgacgttctgagtctggcgacgtgatgatccataaggcattgaacaccctcctgcaagcagcaggtgctattgtcatgaagtgggcaatggtactcctggatgagcgagtccgcaggttaaacctgagggcttggaaagtcctggatatccatgatgaaggtcagtgggaatgccacccagaggatctcattgctctacgtggacagatggaaatctgtgtccgggacgctggagttctcctcggggttaactgtcctttggctagtgattccatcgctggtcgctcgtggtatgacacacactgatacatctgggggttgactttcagccccctttgtggtataataccttcttccctacgagaggtttaagatatgtctaagaaagtatcccaacgattcaccttcccggtagcgaagctgatcttcccctacatcgtaactccggacaccgagtacggtgaagtctaccaagtaaccatctgcattccgaccaaggaagaggccgacaagctggtacagcagatggaatccaaagatgcccgtctgaagggtaccatcaaataccaagagcgtgatggcgagtacctgttcaaggtcaagcagaagaagcacgttgattggatgcaggatggcgagcgtaaatctgctgtaatgaagccggtggttctgacctcggataacaagccgtatgacggccccaacccgtggggtggttctactggcgaggttggtatcctgatcgagactcagaagggtccgcgaggtaagggtactatgacggccctgcgcctccgtggtgtacgactccacgagatcgtatccggtggtgacggtgaggatgatccgctgttcggtggtgccttcaccgaggaagagcccgaggatgtattcgacgaggtattcgatgacgaagacgctcctatctaagggcttggaggatcacgaggcgggggtatgccggtcaggctgcccctactgcttaattgaattcgagagagtgtggggtgtacgggtggtgagttctacagctgcatctaataataaagtagaggtcgatcctaatggaatcaaacctggtgagccgggcgctaagctcgatagcggcaaggtggatgttggaatcatcttcgaagcgttcccgagggctctatatgcagtggcacaagttgctaacttcggagccagcaaatatagtcgcgggggttggaggtctgtcgagaatggtgtccagcgatatgacgctgccttcgggagacacctccttgagcgacacaagggtgaagctttggacccccaaagtaaactaccccaccggtatcacgaagtgtggaacgccctagcgtccctggaactcgtcattcagcaagaggaggaatccaatggaacttctgttggacccaagggctaagactgttcctagcaactactctgtgattggcgtcgatgtagacctggggcttaccccaggctacagcctaacggaggaagctatggacaaagccaagcgtcaagagagcgagtattacgactggaaggggtatgaagcactggccaatccagtggtagagcacccagagtaccgagccaagggtgaagcctttgccctccgtgtcttctgggaagagaagctcaaagaatcccaggtcgtagaagaggtagcgtgatgatagctggtatcgatggtgacgttcttaggtatgagctaggccacgtggctatgtcgaaggaacacatcttcgatatccaggtggagaagccatggcctgaggaagaggtccataagctcgtcgatgataaagtcgaacaaattatcaaaagggtaaatgcagatgagtgtgaaatctaccttactggccaaggaaattttaggctggagcttgcgaaaatcaagcaatataagggtactcgaatcggtcttgaaaagcctcatcactgggaaaccgtgtcagccagacttaaggacaagtggggagcaatcactttccacggtatcgaggctgatgactggctcgggattcgagggactgaagagggagataactttacagcgtgttctagagacaaggatatccgccaagtcccaggatgctaccattacagttggccctgtggagattcccagccggagttgggaccatttcaagttgatggccttggaacagtctccgcttcttggcgaatgtatggtgttaagaaaccgcagaagtcatggaaacttgagggcaacggtacggcattcctctacgggcaactccttgttggtgactccgtggataacataccaggcctcccagggacgggaccaaagacagcgtcagatttgcttggggagctttctactgagagggatctcttcgcagcttgcgcttacgcctaccaacagaagtacggagataattggaaggagtaccttgtggaaaactttcgtctcctctacctcattcgggaccgctcttggcttgatattcagcagtccggtaacgagtatcactgctcactgaagaaacattgggagattccctatgacgatgaagaaatattctattgatgaagcacagaggatctgtgaaggtctctttgagatcctcgaaggtcttggcttcactgactacaaggtcgctggtggtttccttcgggatgcagacaacggggttgcacccaaggatgtcgacctctatgtccgtaggccatacgtggaggaccctactgatactcgccgtagccggttcggcccacggtttatcccctgtgatgatgataccctagaagtagaggtcactcggttctacaacaagctgggccacaagaaggtccggtgtaggactggagataagcctgatgggtatcctgcggggtttgatgtgtgggaatctattggtgttgacctacccgtcaacctcgtcgtgactactcactcccacccagtagagttcgatgtaggactatgtgagatcgcatgttggcctgtaaatcggttgggtttgaagtctcaaatctaccgcacaaaagcttatgagtttgataaggaagagaagtgcattaccctgaaccgtcttctggaccctctcctggatcattctcaacccctaactgacaatcaagttgaaaaggttgtctctcatatccaacgtatcaaactgaagtatccggagttccgggtgtgtctaggggattgggtttggctgctgatccggtctaactctgtcctcactgaggggacgctatcggttgtccgtaagcttcaagaaggagggctcattggcaaagcaggggagattcttcagacccaaactgaagtcattgattgggacgaagtacgacagcgaaaccgagaagatcgtccacgagacgatgccttggatgcagttcaagccggagccggtaccatacgtcatcgaacacaagtacaagccggatttcaaggtatcgaccttacaaccctgtggatcgacgaagcatctgctggttgaagtcaaggggtacttccaggaggcctcggaggcagccaagtacgtctgggtgagggaggctctccccccagatactgaacttgtgtttatcttcgagcgacccaacacagcttgccattggctttccaagcgtaaagatggcacaaagcaatccatggcggaatgggccgaacgtaacggattccgctggtttactctagagactttcaaggagtccttccctaatgagtaagaagtataatgaagacactctcgtcattgcggacacccaagttcgatccgaggtcaacatcgatcacctcgggaaccttggggagtggatcgcacgtaaccgccccaagcgaattgttcatattggggaccattgggacatgcccagtctgtcaagctacgaccgtggtaccgctaagatcgaaggccgccgagtcctcgctgacatacaagctggtaatgatgcgatgcgagttctgctcgatcctcttcgccgcctacagcaacaccaagcgggttgtaagaagcgtatctaccgaccagaaatgcacttcttcatcggaaaccacgaggagcgtatcaagcggtatgaaaattctaaccctgctctccaaggttttattgggtacgatcattttgatctgtccgattggattgtccatgatttcctcgacgtgggtgttatcgaaggtgtcgccttcgcccactacttctacaatcccaacagtggtcgtccatacggcgggagtgccgagcatcgcctcaataagatcaagcgcagcttcgtccaaggccatgagcaagggttcaagtaccacatcgaggcagtaggcaagaagcgaatccacgggcttgtagtcggtagcttctacacccacgatgaatcctacaagggtcctcagggtaacgaccattggcgaggtgtagccctcctccggaaccacaaggatggagagtacgacctcaaactgatgagcgtggaggagttcctgtgagtaagttcttgccagacctgtactacattaagtctgagcatgacttcggtcaacgggggttggcgtttaagacgccgatctccgcagaactctggctggatatgaagtttggtaaagggggtgcagaggaggggcttaagcgtgggatgtataccatcgaagtcctggagatcctctacatccccagtgttcaccttccgaatatcttggggtaagctatgaaagatcgagttggacgtaagctagaggtaggggacagtgtagtcttcctggtccacaggaacacctcctcccatctagccattggcaccgtcgatgggtttacccccaagatgattcggatcaaatgccagaccatgagttggactattgacgctgagtatgttctcaggagcagtgacaaggtggtgtactatgacaaaggctgaactggagaaagcacttgaagagacgcaaagcgctcttgcgaaggctgaggcgaaggccttttcctttgaagaactggctgaagaagctaaaagacagattgaattcctcgaagggatgctagacctagtagaccttagggcttctgtattctacggagattggaggggttatgcagaaagatcaaaagggtaagggtggattcccttggacctacattgcggtagcagccttgtttgccctgctggtttatgtaggatatagctgactgatgttactcctgaccctgggagaaatatccagactcctcatcgatgtattatcttgggcaggttcactgtaggtatccatcgagtaaccaaaaaaaggccccaagggtatcatcccaaggggccttatctttagctccggagagcgttcagcagtgtgttgaacttatccacgagtgcctcgtgagtatccgtataggaagccacggggatctcagatatcttatcctggatggaagccgcaatggcttcatataggccactcacttcgctagccttaggcttccagttacctggtttagcctcactagccttagcacccacctccagaagcttaggcttcccctcaatatcctcccacttcactggctcaaagtctttcgggccaatgacttgtcggagggtcccatcctcattacgaacagcaatagccttcgattgaataacgaatacactgttgccgtagttgtcagcgatataacctgccataatctaactcctaattaagctgccgatttgaaggtacccactgtaccaccgaaaggatacactcggacagtgcattccccaaattgaccatcagtctccgtctgattacccttagcataccaagccttgtccggagatacagcgaacttgatcttagctgtagacccttggataaagtggaagtgacaacctggggttacatctggaccaagagtcacggtgatatccgtggtcccttgagacatgaagaaccaaccagactgctgcttagtcagggtaatgttctgagtaagctgctgggtgttgacgacattaccaccaaggtgagtagtcacgaggcgggggtccaggtagttctgttggagagaaccaatgttcttcacaggaccacgcatgtcatcaaactgctcgataatgtaatccccaatagtaccaccgttctggtcatccgggccaatcacatgcttaatagccacgtaaacacccaggtgttcccgacggggatctactcggaattcactaccgaaggcagtaccgcaaggtgcctcaatcatagtctccgagaagaggccaatcacgtggccagggtcacggttaccacccgaggtttcaccaggagcacccacaagggtgttgaccaggacagaggggataacggcctctgaggggttctccgggaaggaggctgtaacgttctctactaccagggctgcgttctccttaactgcataatagtcagggaggaactctgtagcggtaacgatgttagtatttacccgaccggcatccgaggtaatctcaatgagatcaccatcggcattacgtcggaagacttttggcacatcaaccacgtaggcacggccaccaggaccagcggcatcagtttctacataagttgccatattacttctccttaaagatccagagcatcttccatcgcttccataccggcaacgaaaggacgtgctggagtttgcttatacaagaacttccagatttcacctgcggatgggtcatccccaaacgaagcgatagttttaccaacagccatagcaccctcagttgcagcaccagctactggacccaatagtacctctgcgggggtagtccctcggcggtaacccgttagcatgtcgtagatcatagaagcctggagtggcatctgttgcatcactacgtccatcatccgttgttctggactacgggtatcctctcggctagacccaccgaacttagccagttgacgaagctcatcctggagataccccaggctcatcatcagaccaagagtgaaggctacacctgcggcacccataccagcgttggtccaagaaccagcgaagtgtgggctcagtcgtctacggaacatcggtaggatgatgttaccataggctgctgggtaacccttcaagagggagaacatctgaacgtttccgttgctcatccacataggcttatcagcgaaggtggggtcgaggactacctgatctacaaaccgacgcatggccaaggtcttaacgttgttagccatcaggacttcagatggggtagccggggagatcaacttgagggcatcctgctggctacctatgttaacccccatttcccgaagctgagcaaccttcagagcgccattggcagaactaaaggggagccctgcggctagatccatcaggttgttctgatagaccctcttggcagtctctgttgcaaatactcggttaacatgggttaggatggacaagccgttaatgaggaactgaccacggatcgtcttttggatagtagagttaaacacctcagcaccaacccgatcagccatcagagaggtagcagaggccagggtgtggttcatatcactcataaaccgaccggtctcagacttcggaatcccactgtagatcctgcgggctgcttgccttactacctcacccatggttgggagtacagccccaagggtaggcataaccccagccttagcgaattgtaggctgaactcggttagggtcgagaagccggcgaggggaagtctggagagcacgagggcacccgacgtaacagccgctagcttcttaaggttaggatctttgatacgaccgtgcataccattgtaggcatccactagatcatacatccgatccacctcttccttagtaacccgcttaccagcccgttgagcctcagctacagcagatgcaattttagcgttagccttctccccgttgataccaaaccgttcggtaaaggcaatccggtgggaagccccttcgaagtagtcccggatttcctggagacgcttcttaggagtatcgttcagggagtatttattcaggatctcctgaggtacagaaccaaaggcccggctctcttccagttgaccatacttaggaactgcatcgctttgggcaaaccgtccacgtagagtatctggatcaccttggatacgataacgagggtctacttcccaagccccggtctgctggttctgagtaaccagtcggttaacctcaggggcagtgttaccacgagtatcatccgagacttctaccaaccagttggctacagcatcttcagcagcttgacggttctggaagtacggagtaatatcattcaggaactcgggggtctgaaccttctctggggatagaccgaatggcatataatttgggatagtaccaacggacatcccaccacggttaacagcctcattccttacgtcatccatcaaagcacggagacgggtagcttctggggtattgacacctgcggatgtatcagcgataatcctatcgatctctttggaagacttaccctcaaagatattatcaagttcggagttccacttacctgcctggagttcctgatcctcaaagatggtcttaccagaggctcgcttaccactcatatcagcacggaaggtctcagagaactcacgagcgataggagaggccttggcgagtggctctaggagcgacgtagcttcgtttcctagggcatcccaggctttcttgaccgtacccctaggctctagctcagacgccttaggaggggccgcaggagcattaggatcaacaatggcagagccagctgaatcctgatgacgacccagggtgtccaaaccagaggatacagcaccaccagcagtacccatagctgtaccagtaaaggcagccgtcaggaggttatccatgaactgctctggggtttgtacctgccctactgcatcataggcgatggtatcctggagggcctgctgggcaccagaggtaacaccttcagccacaccagagactgctgcatgcttaccagcctgggtaacagcctcgatagcggtttgcttaggtagtcccgattggaccaacatctggtaagcgccatctttaccgatgtgcttgaggagtggggcagcgataacaccagcacccgcagtgtctagtaccgagaggccagcaccaccgaggactgcggtccatgggttgctttgatcggggtctagttccttcatctggttactcagggcacctacgttgatacccatggaactcaggaaggaaccaatgagcgctccacccatacgaccaggggccccaaagacagagccagccttagcacctgcggcaccaccagcaagtaccggggccatcgaagggagagcctctacgatattattcttaaggaacgacccgatggatgggatatcttggatatcagcgaaagaccgaacatcaggggttccgtactgtgacgcttcctgagcattctcctcggccatctgtgtgccgtagtctttcaggtagtcacttccagtcagttcaccaagggtagcaatagtaccaccgatgttagactgcatggtatcaaccccacgaccaatcgcagagctaatagaattagggtcagccggagttactagggcactcaggtctggggcaggctcaggggtagcaggggctacttcctggggtgcctcttcgataacctctggctcattcaaggaagccaattcagcggctacgtcgaggcccttgacctcagccagttccgcatcaatagcggccttcagttctggagaaagagccataagtcaccttctagttgctggaaagagaataggctcttaagatgtatcttaggatactaaccttcttagtaagtaagtcaaaaggaagaaggaatcttaagagcctataggtctattatactacattttggatactttgtcaagtaccttttatcgggttggggcaggatagtccagatcagcaccaaaccagttacccgtaggttgaagcttagcagcctcccgctggataatacccactgggttagccccaggattagcccgaagttcatttcggacagtctgggcaatagcctgttgggcagtcttactcagcttcttaccacccagagcctgagaaccattgacttcactcaggataccaagggcgtccttagtagtaacagcttcacctcgggctgccttagctgctgcctgacgtgcctgagcgctaatcctagcggtcttgagtcgtacagcagaacctagctgggcattctcttgggccatgtcctggccacgtcgagtagtttcagcctgtagctgggcccgttggttagccaggtcttggccacgtcgggtcaacagggagagcctctacgatattattcttaaggaacgacccgatggatgggatatcttggatatcagcgaaagaccgaacatcaggggttccgtactgtgacgcttcctgagcattctcctcggccatctgtgtgccgtagtctttcaggtagtcacttccagtcagttcaccaagggtagcaatagtaccaccgatgttagactgcatggtatcaaccccacgaccaatcgcagagctaatagaattagggtcagccggagttactagggcactcaggtctggggcaggctcaggggtagcaggggctacttcctggggtgcctcttcgataacctctggctcattcaaggaagccaattcagcggctacgtcgaggcccttgacctcagccagttccgcatcaatagcggccttcagttctggagaaagagccataagtcaccttctagttgctggaaagagaataggctcttaagatgtatcttaggatactaaccttcttagtaagtaagtcaaaaggaagaaggaatcttaagagcctataggtctattatactacattttggatactttgtcaagtaccttttatcgggttggggcaggatagtccagatcagcaccaaaccagttacccgtaggttgaagcttagcagcctcccgctggataatacccactgggttagccccaggattagcccgaagttcatttcggacagtctgggcaatagcctgttgggcagtcttactcagcttcttaccacccagagcctgagaaccattgacttcactcaggataccaagggcgtccttagtagtaacagcttcacctcgggctgccttagctgctgcctgacgtgcctgagcgctaatcctagcggtcttgagtcgtacagcagaacctagctgggcattctcttgggccatgtcctggccacgtcgagtagtttcagcctgtagctgggcccgttggttagccaggtcttggccacgtcgggtcaactccagattagccctatctacagcagcctggttgacccacttatcaaggacgccctcagtcttacgcttggtttgctcaagggtcccttccttaactttcaggttgccctcaccaaggcgtacatcagcagcatccttagccaccttacgctccagatctttttccttgatctgacgatcagcagctgcggcagccatcttctgctggttgatcccagcctgtaggttacgatccagttgacgctcataggaagcagcgaacatatccccagctttaccagtcttgtctatggccgaagccagaagaccagtaccaatgagagcataagatacataacgagacaggtcatcattatccatagtcctcatctgagtcaactcttcgttaacccgattcttaagctcttggggttttagctctacaccctctctctgggcatcagcttcaactacagcctgggccatttcaggacgacttacagcaccagtacgaagaccctcggctgcaccctgttggatgacctgtcgattagcctcctcctcatctgctacagcagcaccagccgcagaggccacctctggagcgatatcaggctcgatagagggttggttaggggttaccccataggacaggagttcagcccccgtagggcctcctgtggcgttctgggctgcacgttggcctacaccctgggcccattggtttgcctcttgagcaacctcgggacccatgttctcaaccgcttggctagcctgagccatttcttctgcacgagtacgctctgcatccccgagttctcctggggttacagcggcttgtacacctacagagataggaccaccgaggatacctgcgatacggcccagggcaccacgacccgtagcctcagccgcaggggccacctcttgggcagcccgagaccaacggtcagggttctctagggcagcctgagcagcccggcggacacgatcagggattcctgagccctctacagccagcggcagtttgttccttgcgattcgcgccatgtccagttcattctgagcagcccggaggatgctagggcgaattggggacccttcataagccatgctggccataggattaacctccaaatagtttacttaggattccagactttggctgctgtccgaaaccgagttcttctgcgctaggaaggattcccactcccgctcccatacctgctgcaacttccgctgcgcctcgttcgcttgctcccctagccccctcgacagaaaagcttggtactgtttctgaagaaggctcacttccttgcccgaggagagccgcgagtgctgctccgcccattgcgccaaaagggtttgattgtccactagactctcccgattgcattgtcccaaggtgggtggggcggtaggaaccttgacggctcaactgtacccgctcctgcccaccacctatattctgtcctatagcgaacagcttctgaggaagggaggccattagaacagaaggcccccgaccctaccaccagcattcataccaacagaagcacccgctgggccaccgaagagagcacccaaggaagcaccaccgagagcacccagggcagacccgaggccaccaccaccgccaccacccgaggaggtagtaacgttggttccacccatgtcgccggagataagctccttgtaggcgagtaggtcgttaaggctgacgttattctcataggcccacttctgtagagccccgttgatctcctgctgctcctgattctgaagcatactaccagcatcaacctgcatggcattaccagagccgagtcccttagcaatagccgagaggttgcccagggtattcaacctattctggttgtaagcctgctggtcttggaaagccaactgggaggcgttattctgttgattctggagcaatctagcggtagcaataccttctgctacacccgctcgggaactcccatactgaccagcattagtggcccctgctcgcaggtctggacgtaccgtagtgtcgaagtcccattgcatctgctcgttggctgcaccaatggcgttcgccaagccagttttgttgggatcgtaaggaccaaggtaatcagccagagagctaacacctgagctacccaggagagactgaagggcactcccgagaccacccaacccttcgattccactaagctggagagcattctggtcagccaccgggtcaaagttcggatcgccaccgtaattggggtcaaagcccccgttatgtagccaatcactggcacccgagagtagttcattatagttaccttgctgatagggtgtagagacagaggtggtcttttgcttcttgctaccacccttgtaagcccgagagtctagggcatcctctacatcgaaccccatcagacgctttacattaaattggaggaagttcatctggagttacctcacgatagaaggatacggagtcttcggtgtacccgagtttctctagggtaggcttccagccccgacgaccttcgcattggataaaccgacagttaactcgttgggcgaactgtccgaggaagtcgtctacctccgagtaatctaccggggtttcattcccaggcatcttaccactccagaagaagtgaaggatattacccaggggtgcttgggacacttggattacaccaacgtagccactctcttcctggtagaagacataggcctcataattaaccaaggagtgaaccaagtgttcgaagtcccaaaacttaccgaggtccgtcctgttgaaggctcgggccagagcagggactacggtaggaagcagatcgatattctcacgagtaatcaaatgaatcatggagtcaccaccagggggaatgtgaatgtacccccgaagactgctccttggggaattccttggattagaacacggccattagctgtgatcttaaacattgcttggttaaccaccccagtctgaatagtagccctgttgagaacatcaaagacttgatccaacggaggtgcgttagggtcagacggaggtggataagtaatagtgctctgcgctgggataatgctggaataggccgggataaacaactcagcaggaggccaatacgcctggggaagatccaggacagtagctccattagtgtagttaccaccagacatgagcatggttatccatacttcatccttagcagtgttcatcctataggcacaggtacccatcggctgatggttgttctgtggggtaaataggataaaatcccccggcaggtccttgggtttagtacctgcgagtctccattggttatccaagtcgtaatgatagatgccggatactggacctaccactccgggggcaaaatactttacagtccctggcttgagcttcttagggggctccatagagaccccccagtagccgtcagctaggtcattaagagtctgtccaaccctaacgaattcatcattaaggaagggcagcagttcctcctcttcctgtggtggaatcgaagggctgtacttttgactcatcgcatacctgccttcggggccatttcaatagtgtacccattgaagtaccaatccccctccgaagagaagtcgaacttcaaggctatataccggcccacatgtttagtgtcaatcttatagtcctgaccaatccggtatgggtaagggcctttccatcgaataccagaaccttgtacctgagcgttacccacccagatgttacaagtaccgttaccagtaatgtgtggaatgatggcactcactgtcttcatcattcgatcatccccgagatagatatcggatctctcaagggtactgacgaagttctgtccagagaatgtagagttattaccgaagaggaacaacttcttatcctggaaagacgagaagatcatactggactttgctgggttataagatccttcaccccagaccgaagtatcggtatcccaggggttggggtcgtcatcccagaggttagacaccttaggatcgatgatcccgtaggctccactgagaacgttgggaaggtctcggatactccaagtgttttccttccagttccagatgatagccctgtcgcagtgcttacctggctcagacctagtggaagagtagcatacccacatttcagtattcacgtggtctgcaagtacgaaggtccgttgatagttgtcagggttaatatccgagaagaagaacttacggacctgagcatcaataacagactgcttctgcacaccgttgtggacatatacgtcaccgtggcctactacaaagtggttaccatcgaactctattgcacagttgggtccgaggatacctacgtcgttaaacagctgctggaattggaagatgaacaatccaccgatataccgcatggagtatacagagtcttccttgtagatgatgaaggagtcacgaagcttcacaccatccacgatagcaccattggtatcagccaaggtgttctgaccagcatccttagtagggtccgttgggtcccaagatgcaggtacaccaccagcatcagccgaggtactccaccagaccatctgtggcatttctacagagttacttgtagcgtttaagccaaccaggaagttcttaaaagacttaagcctcttaaaagtagtattcgctgggaagttagggagtaccctaaaggttgattctgacggtggaagatgatgaggagggttaaccccatcgttagcaaagattaccccgttgaacgatcctacagaccatctgttagttatactagcagcgtaaggtcctggggatacatcgatgattgtagtcccgtcggctagatacaaccgttgttcagaacacaggagccaataggggatgttattccggatgaaaggaaacatatccaagattggggcctgggctgtatcaaagataggcgtatggcccagagccttctgagccttgccgttcttaaaccggacgttgttcccgaaggaccatttctccagtggcaggtcagcgggggcgatatcggtcacaatccccgtagggttcttgacctcttgtctctctagggccattgtatacctcagttcttaatgatgaagaacacagaacagaacggtgggatattacccaacggcatgttgatctttactgcatggttgtgagtctgaccttgaccagcagggccagtctcaaggttggtattggctgcgttaccagagccacccgtcagagcaccagagtcacccgcagaaccggtgagggtagtagcccctcgggatctccaagtgtgggtgtgcgatgggatttgggctagggtaagggcagtcccttcagtgaacccatcccatacgatgttagcgctaccacctctagtacctacagcctgggaagatccgtcgataccccaggggaatgcaccaatgaggttgggaacagggattccgttagaggtagtccctacaccattacaaagcttccaacctgctgggatctgagccagtgacccagcccacatgataaccatcccaggtttaacatactgggttgtatcagcgactgcgtttagctgggctgccgttacagtgacagcctgagaaatattggggaaggtattcttaatagcactcttaatgagtcgcaggtggtcatccccaaaggacttcagatcagagccggtagggttcgtaggcaccaactggttaatataagttgcgacctcaagacccattcttggcctcctttatctcttctttcatttcttttcgggtgacataccgctccccaaagattgccatagaaatctggagatcgctcaccgcttgggtgagcttctccgtggcctggatgtttctttcaagcagagcctgatgaacattctgaccgacaaccgaggaacctaccgtcactaccgaggatacgaccagggcactgacgatgctgcccaggttatcagttagaagttgcatcctccgtcttctccttaaggttgtcttccaggacttttacgaactcgtcgtcaaccttagagttagtcttctccgccagggccttagcaccagtcacgatggacttagcgattaccttggttgggaagagggtagccagaaggttgattgcgagggtttttagaaagataggcatctgaagctccttaacgttcaatgtctttgatcgccagtcgagtgctagcgaagtcagcggcattctcctcgttctggagttccataacagcccgttcgagtttctgaccccagaactgggaccgagcttcatccatggtgtacagataaatctgctcaaggacaccatagagataaatctgcggatacttcgtcagagcccaagtcgttgggttagcgaggcttagctctgggagtacagtccagtagttcacaatgaacggggcaccgtcaggaacaacggggaatactcgccagaagttacccaaccgagtgtagtaggttacaccctgaggttggtagttgtagttaacatagtgggtgaagatatcttgggtgatgtactgaagagtacgcccaccgataagagagtcacccgtgatagaccttagagcaacaaagtgctcagggatctcaatgccaccaccgaaggccatgagagtttcgaagtgttcgttctccctcactcgtagcaatcggttaagacggtcagtagtgttcccaatgaacaacatcagaagttcttgggtaagatcctgacggtcagaccactggatagcggcaatagcgagatcagttacgttgttgatcgtagccattcattacacccgtgcctcagaggtccgcatccgatagttatctcggtcattaagccaacgggtaaatcttgcggcatgatctgggtcacaaccaatcagattaagatcgatgggaccaccttcagccatgggacgattccgtagtgcctctacgacaaccagggggatacttgctaccttgcgcatattatccttgcggttgctattgacacccgagtggcgctcttcggcgttagcggacaggattgactcaacatcttgagtatcctttcggataaagagcccaaggtcttcgtcaattgcataagtcgattggatactcatgatgtacctcctaaggggaaacaaagggccccgaagggccccgttgggttagacctgggctacaacgtcgcggatcagagcaccggacttctcgttgtttacacgcagggtgtactcaaccagcagctggcgcttctcgctgtcaccggtcttagccagttcatgctggaagaacggacgcaggtagcagagggcgtgcatcttcggatcaaagatgaacatggtgttttcgtggaaccagcggttggcacgaatggtgtacttaccgaagtcactctcgtagacgtccacggtctgcgcgatgcggttgtccgaggcatccagggtgatttcagttgcacgacccttcatgttcttgctgatggccttcttgatcgagctcgaagtctggatcgagttagcctgaccaccgttgcgccagatagcctcagaggcattcaggagcatgtcttcggtcagaagacggaggtcaccagcggtaccagtgtcggaaccatcaccagttggcagggtaccattagcacctaccgaaccgttggtcttgtagtaggcaaagatgtttgccatctgacccggagtagtggtgttacgctggatcttagcctgaggggcaccgaccatggcgtattccatgtccagcttcagttccttcgacttcttagccagctgatacgccagttcgttcttacgaccagccttcttgaccttatctgcggtaccggtgacttgcagggtctcgtccgagatttggcagtagttgttcaacatggtggtgaagctaccagccttgatggttgcatcctcaccttcaactcgggtgttcttacccggctggcggagttcatcagtctgccactcgtgggtgatagcggtagctacgcccttgccgatagcagtcatgaacggggtgtcatagggtgcgatgttgtagatgatatcgataaggtcttcgcgcttaccgttgatctctacagtcgagacggcattagttggagttgccataagttacgtttccttctattagaaaatatcgagagaggagaagagagcagcagcggcttcaaccgactggtctttcctcagattagcgcgggcagctttaacccgcttagaaccctctgaggcttccgccctacgagcagcaggtttaactgcggcaggtagttcagtctcctccttcttctctagggcagccttgcgacggacctgagattcagcccacttacgtgctgcatcgagtacagccagttggcgggcatcagatatccctcggatctcatcctcggagtatccaatcgatttgccgtaggacacaatcttgtcaccccaagactcatccgtagtcatttccgggataagtttcttggctagctctgtctgacgcttaacgtaggcagagtggacaatctcggctcgcttctcttgcatagccttaatgtcgttacgacgtttgataagagcctgggctcggtctcgggcttccagggcttccagtcgaagggtttgatacttctctggatcctgggccttaagctgctcccagtttacattgtcatactgattagcaccagcaatagcggtaacagcgtactgctcaagctcggccagtagattagagcgttcagcatcaagctcttcgaatttagccgcatactgatcctctagttcagcctgtcgagttacaaactcttcattgcgaaggtagccactcttaagctcttcgaagttaacctcgtagacttcatccccaatcgggatctcgaagagtttatcctcaggatcttcctcggactcaacctcgggatcttcctcagaaccctcttcttcctcctcggactcaacctcttcggtgtcctctggagtaccttcgtctactacctcttcctcctcttcttcccctacgactttaccatccacggtttcatcaccgggtgccaggaggtcatcacctagcaaatctccgaaggcttccgctgcctcgaattcatccatgccttgattctcaaggtccattacttatactcctttagagtgatcgaatccaggatagcctgaatacgaagttgtacgcggttgagggcatgtagttcgtggtagatggcctccctggattctgaatccttaggtgccgtggacttccactctccctcgatctcttcttggacaatacggaaaagctcaggaagaacgttctcacgtaccatctgttgtgccgcatcagtcagcactagactatagccaaaacgttctcccaagattatttcctcactgccttagatggcttcttagtctcaggtactttaccgtctccgatataagcagcccgagcctgagtagcctcaagatgatactccgcttcgttacgagcccgttcccaagtgaaacgatcacgctcaagttgtagttccgcttccttaagggccatttctctctgctgaaggacagcctcttgcttcttcagttcgatctcggccagtcggatctgagcctctacctgcttcatctgggcctccgcttgcttagccaaggcgtccgattgggcacgttgggcatcagcttgggctttgatatcttcaggcttaggttgtgcttccttctgctctctgatggccttagcccgttgagcttcaggagaatccgggttagtccagaagcgatccgggtctttgtacccagcgttctctgtgacttccttaaggatattgtaaaggttctgctcagagactaggacccccagaccaccacccccgactacagcctgggccatttcccagatacgcatcaggtggagcatctgctggtctttgttcatgttaccaataccaacggtaaccgtcaggtcggatctttctcgccagttggcagggttaatagcaacccacttgcctcgtagctggaagacctcttcctggttctggtacttaatggcatggtcatgcagaagttggaacaaacgtttaacaccagtctctgcgaacatccgtgcaatcaggtcaatctgttgctcagccgcagtcatcaactggttcacactcatagccgcttggttagagtgtagggtattttgatctagacctcgggtacggtcagtgatacctgtccgcttacccctgtctgcctcaagtcgatccagcataccatagacttccccagacaactgaggggtctccagaggcatgatagagttcatggccttaacccgaacgatacccgctgcctcattagtcagcaagtcttcgaggttaacctgaccatccaagactacagatcgaccttggttagtccggtagatgttgtccatgatgttgcgcatgagtaccgaacggatctcttgaatgtctcggatcttatcgtagacactcatcccgtggaacttatgggcaattcgataggcattcagatcagcgaaaggacggcaatcccaaggctcgttgctgatgatatagtcgcctacatacagaatacggcgaagctcagagataccatccccatctacgtccagaagggtatagcactcagaggcccatacctcacgattagcctcggcatcatccccagagttatactggagttgacccgtcatatcgaagttgtcacgtaccaacctttctggctgactatcagagaactcatactcgtcgtatggtagctcatcgagtacatcttcgggaacacccaggagccgcaggtcacttacggtatacttctcacggtgacataggaagcgtgcatcatcaatgcaggtagccaaccgatcaaccaggaagttctcaggcttgatgcaggtgactttaatctctcgcttcttcttatccttgcgaatcttaatgctgtaggttccatcctcgtccacactctgggctagaatctcagtgtctggatcagctaggatatccgctaccatttcctcagagagaccagagaaccgttcgaaggtggggttcaggacctcttccacgtagacctttacaaccccggtcttcatcatcagagtgtcttggaaccagtcgaacattaccttgaacccctcgttcttacgcatgaagaggtagttcacatactcagtctcttgctctgcctgttcaacatcttcggcagtctgaggttcatacttaactacttgaccgcctgacgtgaataccttcataagagaaggcataatccagtctacagtctcttgaacgtccctagatacaatcgcggacttcccaggtcgctcgttaccgaagggctctccaaagtaatacttcagggcctcagaacgctgcttggaaagctccgaagagttgaaatcaagggcgtcgttaacaagttggtctagatgacgaagtacctgttcatcatccataggcttaatcttgcgacgacgcttagccattagacaatactcccaaaccaatcaggggtcaactttgcagtatcactcctgtagtatccactgtttcgtacagcaccaggacgtgcataccgggaagccatcaacagggcataccgggtagcggagatcatatcgtcgtttctgtcgataatctttccgtcctttcggtggtacattttcatttcttttaggaagttcgtacacgtattaaacaccttcagatcaccattctccatacgggtcaacatccagttaacgccgaactctacagagttacctccgtgtttaccatcaggacccggtgggttactgaagggctcatacactacattgaggttgtggtcatctttaagaaggtctacgaatctacgaccagaggttgctccatcgtgcttaaaggcatcatggggaacaactaccgggatctggtgaccacccttcaggtagatagcatcagcgtgcatcccaagggtctcaccactctcactcctctcatcatagaggtagtatttgtctttctcagggtcccaggccacacaggcgatagcgttagggtggtcaaacccaaggtcgataccgatgatcctatggaagtgatcggggatctggaaaggctcacatacaaacttctcttccagaatggggaagactacaccagatccgagcatagggacaccctcggccctcatcctgcgttctgctggagagtatacagagagtagctgctctttaacttctggactgaggtgtggggcgtcttcccagcttgcatggacaaggaactgaccaggtttaagatcctgtaggaagtccttgacgatctccgtgagaccatgctctggggtaaacgtcagatatacaatacccccagtagtagccgttcgggttacacactgggtataaatatctttggggcattcctcatcgagccagatgacgtcgatggcagtacccatgaatttgtcctgggacatttcgtaggacttgaagatgagggacgagaggcccccggaggtatgcttaacaactactgcttgcacacatccgggtttaccttccctacgaatcgtctctacgatatcttccttggggatcatccccgttccgaaagcctcagggttcttccagtctcctaggagttcggactggagaatatcccgagtggtatccgtggagatccccgccgcccagcagttaactggacgatcatattttctaccagtccaccactcagggtatcgaccggttaggtggcaggccatgataaaggccccggtgtaggttttaccacagcggttaccagtcatagccagtagctgggcgcagttcgaggaagctgcgataaacttctcttgccacccataaggagtgtactggttcatgcggaagtatttctgccgctcagccaactccctgactagattccgtagccgctcttgggtatccattagaccaccttgtcacctactgttgatgcacgccacagggcccgttggaggtcccttacgcgcactggagtttgtttagcccagaggctatcctctgcctcccatgcagcttcatcaaaccttccggatttcagaagattccacgtcttggggaacttcttcgtccacgctgtacccagctggaagttgacgctaactagggcatcgaatagctctggagtgcaaaaaggcagctgagatacttgcccttgggctgcatcataggctgccttactatcgttctctagccaagtctctgctcgggctagggtaatcggtccgtcttccccagggagttgcaagtgaccataacctccggtcattttcccaagggagtctttgtaccactttagaaccaacccctctcttcgcttgattagatcaaggtacttaagaggttgggaaagaaatgactttagccaactctggctcttcgtcgagaattcgtcgaacttcactgattagatcctctgcggacatatcttccacattcttagtagtaagctccagtttctgcttagctccgaagcctccacggtccaggatatcctgggctgccttgaggcgaatcccacctttctcttctgggttgctagcaatctctacaaccacacgaagcgccatggggacatgactcccgatgcgctcagagataaaggcgttgatgtattcggcatgctttcgatggtatgcagcaacgttgcgttgagcgtgattaggagagaacccagcggctatatacgcttgggttttattcataccatctgccagagcctcacaatagaggtctagcttttctttagcagaaagaggagcagccccaatcgagacaaccttttcgtctgacatacactgctccgatctctctaaatggtcaccccggtaggactcgaacctacgacctcctgtgtccaagacaggcactctaaccaactgagctacgaggagttaatggtggtcgaaggaaggaattgaacctctagccaatggcgtccgggttacagccggatggtagtagccatctacctctacaacgacctctgttggctgggacggcagggctcgaacctgcgacctgagagttaacagctccctgctctaccaactgagctacatcccaatgaaatcttaaggtaatttctcaaccttataatactattatatcacactttttctattttgtcaagtcttttttcttcttttttttatccccaggagtcccccagataaagtgggggtggcctatccccaggggtatagcccctagcccctccctaggataccatgagactaaccccaagatcaacccctagggataccgttcatcgggtggacccaagggtattcataagaaaaatcttagggtattcagggggtggatcggggggaat

SEQ ID NO: 6 - DNA, 65374 bp, Pbunavirus EPa7
  source 1..65374: mol_type = genomic DNA; note = EPa7
atgtacaaactcaaccctgcactgcgagcggtctggcgaactcgcgcccgttacaaagtcatttatggcggccgggcgtcttcgaagtcacacgacgcaggcggtatcgccgttttcctcgcggccaactacaagctaaagttcctctgtgctcgccagtttcagaaccgcatcagcgaatcggtctacacgttgatcaaggacaagatcgaaaactcagagtataatggcgaattcatcttcaccaagaactctatcaagcacaagagtaccgggtcagagttcctattctatgggatcgcccgtaacctgtcggaaatcaagtccaccgaaggcatcgacattctctggcttgaggaagctcactatctgacccaggagcaatgggaagtcatcgagccgaccatccggaaagagaactcagaaatctggatcatcttcaacccgaacgaagtgaccgacttcgtgtatcagaacttcgtggtcaagccaccgaaagattcctgcgtcaagatgatcaactggaatgaaaatccgttcctcagtgagacgatgctcaaagtcattcacgaagcatatgagcgcgaccgggagcaggccgagcacatttatggcgggattccgaagactggtggcgacaaatccgtcatcaatctcaagttcattcttgcggccatcgacgcccacaagaaactcggctgggagccggccggatcgaagcgcatcggcttcgacgttgcggacgacggcgaggatgcgaacgcaactacgctcatgcacggcaacgtcattatggaagtggacgaatgggacggcctggaagatgaactgctcaagtcgtccagccgcgtttacaacctggcgaagatgaaaggcgcctcggtcacttatgactccatcggtgtcggcgctcacgtcggatcgaagttcgccgagttgaacgatgccagtcccgacttcaaactgatctatgatccattcaacgcaggcggcgctgtagataagcctgatgacatttacatgaagctgccgcatacgacgatcaagaacaaagatcactttagcaacatcaaggcgcaaaagtgggaagaagtcgcgacaagattccggaagacttatgaggcggttgtacatggaaaggtttatccattcgacgaattgatttcgatcaactctgaaacgattcacccggacaaactaaatcagctgtgtatcgaactttcctcgccgcgcaaagacttggatatgaacggccgattcaaagtcgagtccaagaaggatatgcgcgagaagcgcaagatcaagtcgccgaacatcgctgattcggtgatcatgtcggccattctgccgatccggaagcccaaaggcttcttcgacttctaaacacagaaaagcccggatcgctccgggcttcgggtcttactcggtgcggttcctggcgctgagtgtcgatgcaacggcctcgccgacttccagagctgcctggccggccgctagcgcttcgtcttccgactcgacgatgaagtcatcaccttggccgtcgcctggcggaacctcgaccagcacggcttcttcgccttcgaaccgcaggtcataagtcttttcgacggacagtccgtaacgggcattgagcgcatcccagagctgagcttcatagttgcgcaggtcttgcagagatttctggtggctgagcatcgccatatcgacggcccgttgcagggtttcgtccaggacgttgaatcgcatgcgaagagaacgaatccgctcgaccacttccgcatccactacatgtctttcgatcatcgcttttcacctttgctgaatgttacgttgtagccattgtcggccaggtaggtcagggcgccttcgaaggaagttccgacaagatgcttgagctgcatttcgcgttgcgcggcgatccagaatgccgttccggagaactctgcgcggccttccgacaataccttgccatcaggcccgtcgatccgaacgtgaacggaagatagcttcagtaccatcaatgaatccctccactggcttgcgacggcatgctttcagcgcgagcggcttcacagtccgggcagggacaggcttggcggacgcgctccaactcgtcggcatccatgacatagagcttcccatcggaagtgtcgtgcgccatggcgatgttcgagaagtcggcagcgctcaggccggcgacagcgcggatttcgtcccagagcgccacatgctcggcattcaggcgagctgcgagcgcttcgtgctctttcgctacacgagccatgaactcgtccatccggaatgcgaattccgcatcgatggatcgggccgaggccatggagttgaggcgaatcggttctttcttcatggtaattctcttttggctgggggtttgtggtctcccaggcctattcaaagcctgggtagcatgatgctgaagatgaacaagaaggctgcaaacgccaatagcgttcctgtgagtattttggttcggctctgcagctcagcgtactccttggttgacagcccttgctgcgccgcctcggccgcgaaacgagctttcgcctcgataacttccgggcgcagcgacaggacatattctaaggcctcttcccgcgctttttcggcctcgaccgacctagggtcgcgggccgagacttcgctgtgccctggcctcgcgggatgggcctgcagcgatggaggaagttcggcggccacgactccatagtcggcgcaggcccaagcgatcccgatgaggatcgcgaggatggactggacgattcgcagcatcactttgtcgctaggaagacccatggttaatcctccaccgaccgaacgatttccatattgcgtccggcattggttccggcagcgtaggcgcgccgaccgtcactgtcttccagacgcatgagtttggtaacattcgacttcttgtaacccggatcgccgaaatgttcgtggaccgcagcttccttaaccaccaccagagacgttccggccgaagaaaccagttccatacgtttccgggtgattgatctgaggcgatagctgatttcctgggtcgcggccagtttgaattgcgcggcaacctttacgttgaaacgttcgtacccttgagccttctgatactcccgacacagacgatcaatggcctcgaccagggagttgaacatgttcaccgccagctcaacgtccgacttgtagcctttgaagcgtacggcatgaccccagcgcttggtagtgcttccgtcgcgggcactcctggatgccttagccgatgctctgtggttgttgatgccaccggcgaaatccatgatgcagtcattgtacgtcgccacggccactgagaaaaacttcatccagttcgggattgcggaatagtaacgagtggcaatttgctcatcgaactcttcgcgaatctcgccggtagcttcgaagtcgtgaaggtcatatttgtccttcaacttcttcacacgctcggctgcgatggccgcttcgtgcggactggaagagtcggctgccatggcggtcagtttgcggatgcggtctttcgccttctcgatggcttccggggtgaattcgttctggtcggtcatggtcggttccttttgtctgaagggtttcgcttttcaatggagctattctgccttcattcagaatggaagtaaagcactttcttccactatttcggcatcgactggaagaaattccagatccaatcacctgctaccagcaagaggatgagggcggcaaagaacaagacagcggccgcgagctgtgcgccaggcttcagtttgggatggctgagcttgggctctacgggaacggccggagcgctagcgctgcaaccggcgtctcctgggccgtagccgatgccgcgttcacacgcctggagcgacaccagggatttaagatactcggtctgcttttgcgactcttcgtagatgccggcgacggcgaaccagagggcgaacactacggacgtacacacaacccaggcgccggtcagcaggagggccagcgggccgatgacgaagacggtagcagccaggacgattgcgccgccccagatgatgaagccggccagaccattagtgatgtcgacacagaactttttcatttttcagattccttcggttacgggatggaggggatttgaaactctgcgccgccgagaacatcaatgacgacttcccagagcgtcggaacagaccactggtaacggtcgaagtcggtttcaggatcgacgcccagcgtcacataggaagtggcaggccatttatgaacactgcctttccgcatgagagtcgccacgcggccgtcaccgagcggattcgtcctgtgcggaacgtacgcagacatcgaatattgctgcccggcgtcgacaacaaatctttgcctctggcgcagacatacagagcccacaggattccagccgcgaccgccgcaagcctggcgagccgaagaatgctcataaccttcgtgagtcatttcgccgaggcaagccgagcgatcctcgtaatagttgatgttctccatcgatccaaccagcaccagagactcgaaatcgaatcgatgatcgtggatggccgagtgattgaagcaaagccgacgcggcagctccgggtgccaaacatggaggcgaccggccggaagttggacctgaatgaaccccaggccgtgcagagtgatcttgtccttcatcgggtcatggacggtgctcatggataatcctcagtagcagaaatgtattgtgagagttacgattgacaagccggtcgcccatagaagggcgaaccaggccatggctttgatggtcgtgtagatcatccgaagaattttccggcacagatcgggccaatgcccatttcgatggatgcgtggttggtcaactcgcgaccgcagcaggagcactgaccagtcttccgaccgtaggcgactgccgattccatcggcttttcgaacatcttcagaacgtcgtcgtgctcagtatcggtgcagtcgcgactcttgatgaatttgccattggtgatccggccgaggtagatgtcgcccaggacgtacaggctaccggcgttccggctgtgagcgctagcctctttcacaacaacgatgagcggctcctcgccttcgccagctaggcggattttcgggcgcttgataccagactctttcgccttctcaaacgctttctcgatgccggaaatgtccagagtcggcgcagcagcttcctgcgctgccactttctcgcgatacttggcgaggttttcgatggcgcgcttcgcagcagcgatctgattttctgtcaaggagccgtatttatacaacgactcctgaaggctctgagcgaagctgaaggaatttccagtccaccactcgatgatgtccgggtgcgcggcttcgaaggccttaattttgaggtcgcgctcttgcgcagcgctacagattttctcgatgcgcttttctgccgccttagcacggctcttggcgcgctgctccgggctggttttgtactctttgtatccgacgccgccgcaggcaaagcaggcgcgaccataagacgaagggccacggtacaggccggtgcctgcgcatttggtgcacttgtcgcgatacagcttcacttccttccgggagttcgggcgggcacccatggacacgtcttccagggtcttcggcgcttcgttgttgatctctacggtagcgaagtcatcacccaggtcttcgaagccggtgaacagattctctgctgcgttcatgtcgattctcctgtttggaaagttcgtttcgatgagttgactatacgccagaaatggaaaaacggtagcgatttctcactaccgttcgtcgggtcgaagacaatcaataaatgtcgctattgatcttgaacccatgctcagcgccgtcgttgtagtcgtactcagcatagctgtcgcagtagtcgttcaaatgctgaatgatgcctagaacgtcgttcgcggccttgtgccgtttcgcggcgatggtcttggcgatgctgtcgccgacttccagggtttcggccgtccggcgatggatcagcagacggctccaaagatagagccggacgcgacgaatgatgtctcgatggcgctccagtcgtccgtgcaactcttcaatttcttgctcgcgagatttcactactcgtcgaagctgctgaacttccagttccaaatcggccttagtagccatgttcacctcaaaaaggaaaatcgtctgggactccaggaagttcgacgattattgttgagcctgatcgatccagaatgcatccgaccgagccagccctgtggggatagggtctacacgaactataacaggtaacttccatgactattcgccaggtcgatcctccacaccatctacagactggtgggcgcttcgacttcagttttcgttcgtccaagacggcgcgtctgtcgcatgaaaggcagcgcgccttaaccgacgtaaccatgggtatagtcgatcattcggatgagaccatcatcctctgattccctcgacttcagaccgcccaaagagtccgactggccgttgcatttcgcatcgatatccatcgaagacaggaatcctgccgatactgcggtgatatcaactttgtcgccggccttcttgaagtcttcgcactcagcatcgagggccacaattgcactcgcggccatgttcacatgactgatgaggtcggggaagatcacaggaacttcacgcgacatgccacggaccgtcagcttcaggactacatacttcatactcactatcccttttgtatgtgaggaaagaacttgctgttttccggatggtgaaaacgctcggtcgcaggcggtctttcttccggacattgaatcgtcgaaggcgggaaaaccgcgccggcgataatcgccgcgaggagtgcagcggatgtcgacatccagagggcggtttccaggctcacccgaacttccggacggcgcggcttcattcgctccaccctcttcctggctcataggatggcagaccgccgccgcgaatccaattgtcccacatacggttcagaccagtcggtggctggggcggcggactgtagaatccgggagtctcagtgctgctcaggaaataaggcgtgcaaacggcctggacgaccaattggtgccgctcccacatcttatcaatcgctcttagcatgacgtcttcgcactgagccttactgtcgaaccgtctgctagtatggtccggcatctggacgcagccgtctccagtgcaaaggaaagcagtagcaatccatacggtgatactcgccatttcgtcaccctctttagttgatgagcagagtctattccatctgctcgccaggagtaaagcgcttttcgtcgggataaatgccgatgatgtctgcgtcgagcatccaaatctccacggacggatcgtcgctttcgatctgatacaggttgtacaactctttctcgtcacgcgccgattcgccgcgaggttcgacagccaagatacggccgtgcccttctccattctcatcgcgatacatgacgcgatccccgactctatagcagtctcttttaaagaggcgcgagcgcgagctgtttggcgattccactacccaggaatccacaaccgcgtctttcacattactgtaccacttcgcagatttgtcgcagtcgaacacgcccagaacttcgccgtctttcaacacgatatgtacgataggaagaagaggattcatgttaatctccattggttgataattagagtctaatctgccgaaaagttcccgtaaagaattattttctcataactgattagttgcgactgttaatgtgatgtatctgtttgaatctcttttgaacgtttgatgtttcccctataataagtgcacacaaccagcaaccgcatggaattaaaatgtttaaactttcctggatattcgggcgcaaaaaggacaatgctgcctgttctgaatcggcgccggagaaagtcgcacgaatccctcaacacgatccgctcgaccctatgattaagctggggaagattcgcggctggaatgtcgagccggagaaagccccggtcatccgtagcgtgaaggattttctggagccgggcctatccgtcgcaatggacagtgcgtatggtgacggacccaccccagccgcgaaagctgccgctggcggccagaatccctatgtagtaccgaccatgctgcaggactggtataactcccaaggattcatcggataccaagcttgcgccatcatttctcaacactggttggtcgacaaagcttgctccatgtcaggcgaagacgcagcgcggaacggatgggaactcaagtcggatggccggaagctgtctgatgagcaaagcgcgctaatcgctcggcgcgacatggagtttcgcgtcaaagacaacctcgtcgaattgaaccgattcaaaaacgtcttcggcgttcgaatcgctctgttcgtcgttgagtctgacgatccggactactatgagaagccattcaacccagacggaatagctcccggctcgtacaagggaatttcccagatcgatccatattgggcaatgcctcagctgactgcagagtccacagcagacccgtctgctgaacacttctatgagcccgatttttggatcatcagcgggaagaagtatcatcgcagccatctggtggtcgttcgtgggccgcagcctccagatattctgaagccgacatacattttcggaggcatcccgctcacccagcgcatttacgagcgcgtgtatgctgccgagcgaactgcgaacgaagcgccgttgctggcgatgtcgaagcgaaccagcaccattcacgttgacgtggaaaaggccatcgcgaatgaggatgccttcaacgcccgtctggcgttctggatcgccaatcgagacaaccatggcgtgaaagttattggtactgatgaaaccatggagcagttcgatacgaacctgtccgatttcgacagcgtcatcatgaaccaatatcagctggttgcggccatcgccaagactcctgcgacgaagctactcggcacttctcccaaaggattcaacgcgactggtgagcacgagacgatttcttatcacgaagagttggaatcgattcaagagcatatattcgatccgctgcttgagcgtcattatttgctgctggcaaaatcggaagcaatcgatgtacagctggaaatcgtctggaaccctgtggactccacaaccagccagcaacaagccgagctgaacaacaagaaagctgctactgatgaaatttatatcaattccggcgtcgtgtctccggatgaagtccgcgagcgcctgcgtgatgatccgcgctccggctataatcgactcaccgacgatcaggccgaaaccgagccgggcatgtctccggaaaacctggccgaactcgaaaaggccggtgcgcagtcggcgaaggcgaaaggcgaggccgagcgagccgaagcccaagcgggcgccgtagaaggcgcaggcgacccagttccggccgctccacgcggtactaagcccctcgcgaaagcggccgaggaaggggccggcgaggccgctacaccgccgtcgcggccgaaccccagggccgagcttcggaacctgctgtccgatctactgtcgaaactcgaagccctggacgacgcgcaggctccggacggcgtggatatagagcaggatgacgcgccaggtctgaagagaacgtcaaagccgagcgtatcgggtatggagccttcggtgttttcgtctaaccgcatcgtcgggcctcgtgatcattcggaactccagagaatcaaggtgaatggaataaccaccttgatcgaaaatccgcgcggaagcattcggcaaggaaaggatgggagttggcgagttcagatgaaacaccactacgggttcatcaagggaacgaaaggcgctgatggggatgaagtcgattgcttcgtcggtccgaatctgggatccaaacgggtcttcgtcgtcaaccaggtgaacaaggaaggtcagtttgacgagcacaagtgcatgctcggcttcaacaacatcaacgatgcgaagtctggatatctgtcctgcttccgtccgggctgggatggtctcggctccatccatgaagttgacctgcccgctttccgtcgctggctggcgaacggcgacaccaccaaaccattcgggggcgagtgatggcattcaaggcctccaaaaagcgcgagcgccgggcacctcttccagtcggaagagggaagcccataattccatcagcaggaatcgaggcctggtatcgaaagcagatgaaggatatttccaagctcatgatctccgactatcgaaacgagattgagaaggcgctgtcccagcctgcggccgaacggttcttcgccagcgacgaatccgtgaacgtcctgttcaagatgacccttcgaagcctacagcagcgatggagccgcatttttgaaggcttcgcggccaagatcgccccggagttcgtcaaccggaccgaagaagccgccaccgccgcgacccttcacagcttgtcggtggccggcgtcgatcagccacgagctgcgtataatgagagcgtcaggaacaccctggaggccgcaaccacttacaatcatactctcatcaccaagatccaagaggaagtccacgagaagatttacacatcagtaatgctgtctctgacttccccgaatccggaagagcaaggagcttccggcataactaacgcacttcgcaaagtcgggaagttttctgaagatcgaatcgaactcatcgcaagagatcaaaccagcaagctttacagttctctgagcgatgagagaatggcggaaaatggcgtcgaggagttcgagtggctacactcttctgccggcaagactcctcgccacacccacctggagaaagatgggaagaggttcaagctgaatgaccccagactttgggagggtccgaaagcagaccaggggccgccaggatgggcgattaactgtagatgcagaaagataccagtcatttgacatcgataggagcgctatatgccgttagttcatggcacttccaatgaggctcgttctgaaaacatcaagcgggaaatcgaagccggtaaagacccaaaacaggctgcggccatcgcttattccatccagcgcagtgagaaagggaagacggcgaaagattgttcgcctaagctcgtcgccgatcttcgcgccctggtggacgctctgtcgaggctcgtgaaatgaaccgcaagacgtgccggcgccgactcgtggtcgatgtaatcagggccaatattcacggcggattcttcagcctgaagtttgccgccatcgatttggcaatcatcggcttcgccatcttgatggcttttggccgataatgctgagaaaatctggattctgactaaaaattctagtccggatagccgcaaattaccgtttacggaaaatagcagtaatttggaaatcctactgccgcgaggctttaacagagccagttcctaatttccgatttagccgcatgcttcaaaagtatatagcctgggaaattagaagtaacgttccaatagaattcatctataagtaacgctataatataacgtcaatctatatactctagacgtattgaaattcaatttttaatcggtaaattggtaatttgaattagtttaggagttgaaagcctcgcggcagtaggcttagacaaatcccgtcaagtttccgagaccaaattaccggattttcgcgactgaggaaactggtaattagatcacaatacaaattataatgtaagttaacagtcgcggctacatctaattattgttccgcttatttacccttagatgtactgcgtatataatacagccatagtccacgactcttcgaattaacgatggcaaagtcgaaaagaaaaattgacgaaaatggatatatgaccatagagggctgcccgatcagctcttatggcgttttccaatattctgctggtcaactcggtcttccgggcgatccgacgcggattgtcaacgtatatcgcccggagtctgccgtcagcgatccggagtacatcgaatctctgaagaatctcccgttgatcgacgagcatgagatgctgtcgggattcgacgatgatgacgatagcgtggcccccgaagacaaaggggtggagggcatcatcacatccaacgcttactacgaagccccatgggcacgcggcgatatccgcatctattcccgcaacatgcagaatcagctggaaaggggcaaagaagacctgtccctaggctatagttgccgctacactgagcaacccggcatctggaacggaacgccttatgaagtcgtccaggacaagatgcgcggcaaccacattgccctggtaaaagagggtcgtgtgccgggggccagagtattggatggtctgtgttttgaccatctcagttttgatttcagaccatccgatgagggtaatgaaatgagtctcaagaaagccaagcggaagccccctgtccagcgcgtagggcaagctgctgactcggcggtcgaagagttgcgcgccctgtggccgaagctatctgcgtctgtccagaagttcctgggcgaagaagagcaggagccggagcatcaggaaggcgcagctccggccgaaccgaccgacagcgagcacctgaccgagcatccgactctggaaggtgctcagaaggatgacgaagagcaggaagaggagccttccgttgtcgatccggccgtggccgccgtcgagccggagcatcaagaaagcgccgcatccgaaatgtccggtgaaggcgaagtcgccgaactgatctctcaggtcaaagccattctggctcgactggagggcacggtagccgaaggggcagacgaagagcatggcgaaggtcaagatgtcgtcgagggcttggaggagcagagcagcctcagcggctcgcaaaccgccagcgacgatggtggtgagagcaaggataacagcgaggaacttcctgaaatggcacagaagaacgcgcaagatgctgcaattcgcggtctctatcgcgacattgctgctaaagatcgcctctacaagcgtcttagctccgtggttggtgcgttcgatcaccgagctatggactcggctgaagtcgctgtttacggcgtgaaaaagctgaacatcagctgtgcgaagggccaggaagctctggcgctcgacatgtacctgaaaggcgtcgaagcctcgcgcggcgcggccagccgtcaatcgaaagcccaggattcggccggttctgctccgcagtgtgccgagctggacagctacctgaagggggagtaactcatgttccagaaacaagtttaccgccagtacactcctggttttccgggcgatctgatcgaggacggcccgaagcgggcgcggccgggtcgaatcatggctctgtcggccgtaactccggctgccaccgccaccggccccaaccgcatcagtcgcgctttcggttatgccggtgacgtcagcgccctcggcgaaggtcagccgaagaccatcgcggctcgtgcttctgaagtcgtgatcggcggcgccaacttctttggtgtcctcggtcatccgaagcactatgctctgttcggttcggccggagactccctggctcccagctatgatctgcccgatggcgccgaaggcgagttcttcgatatggccaccggcctggtcgtcgaaattttcaacggcgccgcaaccgccctggacctggactatggtgacctggtcgcctatgtccccaacaacctggctaccgccgacaacgcgcttggcctgccggccggcgccctggttggcttcaaggctggctccatgccgaccggcttggtccagattcccaacgcacgcatcgttaacgccatcagtctgccggcccagtcggcggggaatctggttgctggcgttaccatcgtccagctcacgcagtaaggaggcgtcatgagccagatcagcaagacccattcgcgcctcgcaggccgcaatgcgaaacctttcgacctgaaaaacatcaccaatgacgccgtggcgtctctgcgccgcatcggcctggtattcgatcacgccgtcgtccaggaccagatcaaggccttggcgaaggccggcgcgttccgctccggctcggccatggacagcaacttcaccgccccggtgaccacgccgtccatcccgactcccatccagttcctgcagacctggttgccaggcttcgtgaaggtcatgaccgctgcacggaagatcgacgaaatcatcggcatcgataccgttggctcctgggaagatcaagaaatcgtccagggcatcgtggagccggccggcactgcggtggaatacggcgaccataccaacatcccgctgaccagctggaacgccaacttcgaacgccgcaccatcgttcgtggcgagctgggtatgatggtgggtaccctggaagagggtcgcgcctcggccatccgtctgaacagcgccgaaaccaagcgccaacaggcggccatcggtctggaaaccttccgcaacgccatcggtttctacggctggcagagcggcctgggcaaccgcacctatggtttcctgaacgatcccaacctgccggcattccagaccccgccgagccagggctggtccactgccgactgggcaggcatcatcggcgacatccgcgaggccgttcgccagctgcgtattcagagccaagatcagatcgatccgaaggcggaaaagatcaccctggccctggccaccagcaaggtggactacctgtcggtaaccacgccttacggcatttcggtttcggactggatcgaacagacctatccgaaaatgcggatcgtgtcggctccggaattgtccggcgtccagatgaaaaaccaagagccggaagatgctctggtgctcttcgtcgaagacgtgaacgcggccgtcgatggcagcaccgatggcggcagcgtgttcagccagctggtacagagcaagttcatcaccctgggtgtcgaaaagcgggcgaagtcgtacgtggaagacttctccaacggcaccgccggtgcgctgtgcaagcgtccgtgggctgtggtgcgctacctcggcatctaacagatgcctattcaccaaaggccgggcttccggcctttgttcactctgactctaactcggttgtaggggccggttagggcataattactaggactacgccaatgactgtttatatcgtttcctccatgactcaatcggtgtcttacaatgcgtatgacacctctgatccgtccaatcctcgcctccagcgaaagattctgattcgcggccgcgcaggcatcgcatccgaaacttccggcttcggcgacatgatttccgacgaggccggacgtccgatctggaccccacagggcgattgtactgccgtgagcgattcggatttcgagctgcttcaggccaataagattttcatgcgtcacatggagaagggttatctgcgagtcgtgaagaccgacatcaccagtgaccaccagcggatttccaaagagactcgcaccatggagcgcgatggattccagcctctggatgctactcgcctgcagcagaaaatcaaggtgaccacagccagcgcttcccaggaacaagagttccggatttaaccgagggtttcggtatggtgattttcgacgaacataagtttcgcacgctgtttccggagtttgctgatccagccgcttatccggacgtgcgcctgcagatgtacttcgacattgcgtgcgaattcatttctgatcgcgattcgccataccggattctcaatggtaaagccctggaagcctgtctgtatcttctgaccgcccacctcctgtcgctgtccacgatgcaagttcagggcgcggctggaggtggcgtcactgccggtgggacccagggcggtttcatcaccagcgctactgtcggcgaggtcagcgtggccaagctcgcgcccccggccaagaatggttggcagtggtggctttccgggacgccttatggtcaagagttgtgggcgctcctcagcgtcaaagcggtgggcggattctacatcggcggtcttccagagcgccgaggcttccggaaggttggagggacgttctggtgatccctggtgcgaatcttctgcgaatggccttcggggtcatcggtactcaaattgtgaaatatcgcaagtttgagcagcgagtgaagaatgatcaagctcagtacgtttccatgttcgaggagcctttcgacctggcagcgtctgttcagcgagtccgacgcgatcagtatgtccagtttaatctggagttccaacggaattacgttatgatcttcgccaactttgagatggttgacttggatcgcgatgtggccggtgaccagttcctctggaccggaagagtctttcagctggagtctcaaggctcctggttttatcaggacggctggggagtttgcctggccgtggatatcggtgcggccaagctcactgatgacgggaaaccgactttctaggtgatgtatgtttgacggcgaactgatagcgaaactggttgtcgagttgaatgcggcgatgacatctgctcaagaggctttgcagttcccggattttgaagtcgtccagaaagctcagccgacccaacagggaacgtcaaccaggccgaccatctttttccagaaactgtttgacattcctcgcggctggcctgccaccgattggcacctggacaacacggcccgcaaatatgtagaaataactcgacagcatgtagagacgactttccagatcagttcccttcattggcagaatcctgaaataactcacgtggttacggcttctgatatcgccaactatgtgagggcttatttccaagctcgatccacgattgagcgcgtaaaggaactggacttcctcattcttcgcgtgtctcaaatttccaacgaagcattcgagaacgacaatcaccagttcgaattccacccaagttttgacatggttgtaacttacaaccaatatattcgcctgtacgaaaacgcagcatattcggccgatggggtattaataggcatatgagtctgaggcgcgattcagagctaatcgccgcgcacctccagatgttaagagtcatgcgcggcaggtccgtttcagccggatggtattccacggctcgatatcctgacaaggcaggcggatcggtcggaatacaagtcgcgagaatcgcacgtctcaatgagtacggcggaactatcgaccatccgggcgggaccaggtatattagggacgccattgttcggggtcggtttgttggcgttcggttcgtcagaaacgactttccgggagaaaccgaggtaactaagcctcacagaattaccatcccggctagaccgtttatgcgatatgcttggaacttgttttccgcagatcgcgccgcaatccagaaccggatagccatgaggctggccagaggacagatcactccagatcaagctcttgcccagatcggcctggcgttggaaggatacatagccagaagcatcaggaccgggccatgggtggctaactcagcatctacggtcaggagaaagggattcaacagaccgctggtcgatacggcgcacatgcttcaatcgattagcagcagagtaacataaccaggagatcatccagtgatcagtcagagccgttatatccggatcatttcgggcgtaggcgcaggcgctccggtcgcaggccgaaagctgattctgcgcgtcatgactaccaacaacgtcatcccgcccggaatcgtcatcgagttcgacaacgccaacgcagtcatgtcatacttcggcgcgcagtcggaagagtatcagcgggctgcggcttatttcaaattcatcagtaaaagcgtgaattcgccgtccagcatcagcttcgctcgctgggtaaacaccgccatcgcgccgatggttgttggtgacaatctgccgaagaccatcgccgatttcgccggcttctcagcaggggttctgaccatcatggtcggcgcggccgaacagaacatcaccgccatcgatacgtccgcagcgacttctatggacaacgtggcgtcgatcatccagaccgaaatccgcaagaacgccgacccgcagctggcccaggctaccgttacctggaatcagaacaccaaccagttcaccttggtcggcgccaccatcggcaccggcgtcctggctgtggcgaaatctgccgatccccaggacatgtccactgccctcggctggtccacctccaacgtcgtcaacgtcgccggccaggctgccgatcttcccgacgcggccgttgccaagagcaccaatgtcagcaacaacttcggttcgttcctgttcgccggtgcgccgctcgacaatgaccagatcaaggccgtgtcggcctggaacgcggctcagaacaaccagttcatctacacggtcgcaacttccctggcgaacctcggcactcttttcaccttggtgaatggaaacgccgggaccgccctgaacgtgctgtcggcgactgctgccaacgacttcgtggagcagtgccccagcgagattctggccgccaccaactacgatgagccgggcgcttcgcaaaactacatgtactaccaattccctggccgcaacatcaccgtttccgacgataccgttgcgaacaccgtcgacaagagccggggcaactacatcggcgtcacccaggccaatggccagcagctcgcgttctaccagcgcggcattctgtgcggcggtccgaccgatgctgtggacatgaacgtctatgccaacgaaatctggctgaagtcggctatcgctcaagcgctcctggacttgttcctgaacgtcaatgcggttccggcgagcagcactggcgaggcgatgaccctggcggtgctgcagccggttctggacaaggcgaccgccaacggcacgttcacctacggcaaggaaatcagcgccgtccagcagcagtacatcacccaagtcaccggtgatcgccgcgcctggcgtcaagtccaaaccctgggttactggatcaacatcaccttctccagctataccaacagcaacacaggcttgaccgagtggaaggccaactacacgctgatctattcgaagggcgatgccatccgcttcgtcgaaggatcggatgtgatgatctaatggtttgcggcggactcgatccgccgcgaccttccataaatggagtgaggaataagcaatgatcaacatttctgcgttcggctcgatctgccagttcacggcaagcagaactttcccgaacggattcaccgtcaccgagtttgccgacgatgcggaccccatcgacagcccgccgttcactgcggccgataccggcgtcggcctcaacggtgacatggtagtctggaaccgggcgaacatcctggaagtcgtcgttaacgtcattccgaataccgagggcgagcgcaacctggcagtcctgctggatgccaaccgcaccggaaaggacaagtcgggcgctcgtgatgtcgtcggcctggtcgtggcgatgccggacggcagcaaaatcacctgcaccaacggcaccccaatcgacggcgttctgatcaacgcggtggcaagcgtcggccgtctgaagaccaagccgtatcggttccgatttgaaaaagtgatcaaagccggtactagctgatgaagaaaattccgctgacagcagtccccaatcaagcgatctcatttaacgccggtagcagctattggaagattcgcctgtaccagaacatggacatgatgaatgccgatatcagccgcgacggcgtgatcgtttgccatggggttcgctgcttcggcgggattcctcttctccagtacagccatcagtaccgacctgactatggcaatttcgtcttcgaccgcgacgccgattggacattgttcggcgacggcatcaacctgttctatctggacggcgccgaattcgccgagtatcaggcgcttgccacgaggaaagaatgagcacatcaacgatcagaaccgggacgaacaacgatatccttttggacgacaatggaaacatggttatcctcagggatgtcgaagcgtgcgcccaggacgttcgggcggcgatgctcatgcgcaccggcgaaaacattttcgatgtgaactccggcgtgggatatttcgaatacatcttctcgccgcagaaaagctatgatgacgctcgcaaatccatcgcggatgcaattttatcctcgccggatgtgaccggcatcgagcagcttgacatcgacataaccggggaagtcttcggcgtcgatgcgaaagtcatcaccatccacgggcctgttaccacaggagtttgaaatgagtaccatccgcatccaatacgccaacggcacccaactgttcctggacggcaaaaatccgccgcccctggacccgctgccctcgtttaacccgtctgtcgaagatctggaaggcctggaccgcgaaaagaacatcgacaagggcgactcctcgccggccggtcttcccgttcccccggtaaacgtcgattccaatgtcgacaacggcggaaccatcccggctccggtatcgaccgacgctgctgcggccgaatcggccccagaaggcgcccaggaagctcctgcagcaggccaaggcgacgagaaaggcgccgaggaagccccgactacagccccggtagaaaaggccgaggaaacggcctcgccggccgctgaagaggaaaccccggctcccgccaaggccacctctcgcaaaaccaccagcaagtaaggactcgacatgatcaacgtcagcggcttcggcacaggaattgtaatagtttcagcctcatcgttcccgatggggttttccttgtcgaagttcgctgatgatgagagtccgatatcctccaaagagctggagccgttcggatatgagatgctttatgacggcggcctattcgcctttgacaaggctgctcctctggaagtatctgtatccgtcatcgcagggagcgaggatgatattaaccttcgcatccttctcaattccaaaaagggatcattcagatttcttccgggcagcatcccggatatgacgactctcgtggccactcttcctgatggcggccgcaccgttctgtccaatgggactatcatcaagggtccggccatcgacaccatacagaacaccggacgacgcaaaggcaacacgtacacttttgttttcggtagctatcttggcgcccagactgcgcgtcaagccatttctaacgttatccaatcggtgctggaggtggtctgatgttggggattttcaccagcctcctaagttcgcgatctttttcgattgtggaccaaaacacaaaccagctagttgctgcggatttgaggataagccgggtcaacacccggttttcttctgtagggcaacgccacatgctggaagatggtacgaccaagatggattccagaacgatccaccctatggaaatcatcgtcgaagtattttgcccttcaattgatgtcgtcgatcagatcaatcaattgctcctggatcgcgacacactgtacaaagtcatcactcgcggcatggtattcgaacggatgatgtgtaccagcgaagcgctcaatcagactccggatatgatatcggcgactcctgcgcggctgacattctcccaagttctcgtccagaatcccaagcctataatgttcagaaatgcaggggactcttctatgatcgaccgagggctggccctagctgaagacgtggttggctcggccggcgatctgttcgactacgcagtaaacggcgtccagaacgccgcagacttgttctgaggtgccaattgaactctttcctcaagtctattctcaacacgcctactctcaccatacgcaatgatgttaccaaacttcctgtctggaagagtcttcaagtcaagaaagtggaaatttactcgccggcttccgtagtgtcgaaacctctggcgacgaaagaccagacggaagctcaagtgtacaccgaagctctggacattgatgtgaagaatggaaagatcatccaaccggtgcgactccgcatcaatgctatctgtccggacctgtccaccgttgaaagtatcatgaacgctttcaatgataacacctcgactttcgctatcacttctaagtcgatattggccgataaaatggccatcatggcgctcgatgtagatcagtctccagacatgttgaacgcggctgagatcaatatggaattcgagcaggttgagcctccagtattgaatgaattcgatcctgcgttccctcaagatagtccgacttatggggtacagattcaatctctttctgatgctaatttgctggatttgggcgccatcggcgattcgatatcttcggccgcaaaatcgctatataatcgcgtgaccagctacttctgaggatgtatcatgcttgaaatcaatcttcccgatggccgtcaaactcgcgtacaaatcgaggcgtggtcggcattggatggctgggacctccagcgccgtttcgtcgaattcgctgtcagccaagattcagacttccgccgctctttcaccatggaaatcctgggctatgcgaaagtgctgcttggcgacgatgacgccggcattccgctgaccaccgcggcagtcatcaacaaccacctcggccactggaagaacgtggaactggttttcaactctgttctcaagcacaatggcatcgacccggccacgcacgccgaccggccggactattgggaacaagtcggatcgcagatggccatcgcatttctggccgaggcgtccaagctcattggtccagcaatgaagatcgccgaaggactcgccaacaagccggagtgattcatgtctagtgatttggatgaattcatacttcggtatgaggctgatactgccagagccgagcgcaatctggagcgcctccagaaccagatcaggcgcgtgaacagcgcatcgacgagtggccttcaggatttgcgccacttcgcagacggcgcggccaccgaactcggcagagtcgttccgcagattgattctgtgacgagcgcaattcgcggaatgaacgcgcaactggcaataggcgccactggcgtggccctggtcgcggccggcgtcaaggcgttcatgaacaccagggaccagtacaatcagcagcgcatccaggcgatggacatcggcatcgccccggcacgcttggaagagtaccagagaaaattcgttcgccagtccggtggaaccatcagccgcgagcagggcgcggagatgaccaaaaatctggcagacactttccggcgtgcttatcgcgatatcgggcgagtcggcccggaagcgcgaattctgcgtatggccggcgtcgatgtcgggagcttccaaaagggcatgcggccgctcaacgacatcatcaccgatctggccacgaaaatggccaagctgaagccggacgaaatttctgcctacgctgatgcccttggcgtctcgcgagattacctgagcaccctggcgaagatcggcccggccatgggaaaagtcactgagatgacgactgcggaactccagtccagggtccagggcgagtccaacatccagaaattcaacgatgccctggcgaatctcaaccagacgttcactaccctggaaaaccgagtcggcgaaaagctcgcgcctgcgttcaccaagctgatcgaaatcatcgacaagatagtccaggctattcccaatgaagtggaaagcttcgcgaaggacaccaaatcccgttgggaagatggagtgctcgggaaggcgaccgttggcagtgatatcctatccctcctcagccccggcgccctgctcggtcgcctggcagcgtgggggactcgtcgcggcatggaagaatcagggctcatcgacaaggacaaggttcccggcgctcaaaccagcgaagacctggccaagaaacaagaagaccaggacaaggctactaagtccatgaaagagctagagaagctggctgaccagaccacgaagtctaccaatgattttgcggtggcgatcaacatgttcagtggcgcggtatcgtcgttcgcgaatgccgttgacgagcgccaagcttgggcagcctgggcgggggaaattggtcgggcggtcggcatgggaagcaccgcgccgacttcgcgggccaccggcgtctatccgcacgcgatctatgatcagtcgaagagtggcgcggccggacaagtcttcggcgagccaatcggcgcccagtctcttcgcaatcgcatgttctcgccgcagcgcaaggcagagccggtcaccgttccatcgtacatcaacgatatcatcaaagatgcttcgaagatgtacagcattcctgagctggacatcaagaaactcatatacaccgaaagccgattcaacgccagggccaccagcgaagccggagcgaaaggcctcatgcaactgatgccggaaatcgccaaggcgtatggtatcactgacgtatatgaccctcgccagaacatcctcggcggaacgcgcctactgcgtgaaaacctagatcgagcaaatggcgacatgcggttggccttgacatactatcatggcggactcgatccgaagaactggggcccaaggactcgcgcatatccgggtttggtaatgagcgctccaatcgagctgatggaagaggctcagcgcaagcagaaggctgcggccatgaccgtcgccaacgagacgttcgccccggaaggcggcgacatggacattcgtccctatgatggcgggcgactggaaaccccagaccagggcaagaaggaagatgagcgccgcgaagcccgtcgatatgacgacagggttgtgcgaccggaaattcgcatcatcgaccgcatgccagaccgcagcgacggcgaaatcctcaagatgtctaggcgtcaagaggccgaccgggcagactctggattccggaagttcccgaatcaggttcgcggcgagaccaagcagaacatccaggcccaactcactgccggagccatcgcgcaagtgatcggcgttaaccccaaccagatcatgcgccgcgaaatcagccgttctgacttgctattcggatacaaccaagccatcctgggcaagcagcaggagatcaaggccgccgcgaccgaagccaacaacgtattcctgtctccagccaagctcgccgaagccactgccaaggtgaacgccgcatcgcgagaaatggatattctcaggacgtacggcgagcaacttctgaagagcgctccagagcgcggccaggagctgaccatcggtcgaatcgatatgttggtcaacgttaccggcgcgaattctccggaagaggctcgcgagatattcagcaagcagactgcagaccagctgactacggcaatccaagatgcccaaaacgattccgcaactaagatactctactgatgaaaaagagaattctgcgagtaacattcaacatgccttatggacccgaagtcatccgagaggatttggatgttcgggtccggatcatgaaggctgcgttgcggattcagaaccgggcgactatggaaattttcggcctaaccactcagctgcgtgagtctcttctgtcacagttcaccgcgtggaagcaccggcaacgtcaagtcggcagggaagacgaattgatgatcaaagtgtcggtggaagccggctactctgaccaggggcgcgagcaagtttccagagtctttgtcggcgaagtggccattgtcgatatcatttcgccgccaccggacattggaatccgcatccagtgctacaccaggcaaatcgacaggacgaagaccattcgaaatatgccgcccgccaacacgacgttcgtcaagttcgtcgagtggggcgcgaacgaaatgggattgaacttcatctgcgataccagttacaacgatcaagttctgaagaatccgggccggtctatcactgtcgcgtcggcaatcctggcgtcgattcaggatatgtacatgccggacgtggccgcgttcgttgatgatgacatcttgatcgtgaaggatcgcgataaagtcattcgccctgatgaggtgaccaacgtcaattcgttcgttggaattccatcttggtctgaatggggcgttgaattccagtgtctgtttgagccatcgattcgcgtggctggaggcgtggcggtcgaatcgctcatgaacccgagcgtcaatggcaactatgtaatcactgctctggaatacgatttggccagtcgggatcggccgttctatatcaaagtcatggggagcccagcagcataatggccagggaaatcaaaccgttcaacatgttcggcgttcactatacttcgcggcaattctctgctgtcgatgggctcagcatgatgtcggaaattcagagtgtgccgccagaagaactgctcaagggaaccagtgtattggcgcatccggaagatcatccggaaggcatctggcttcccttgaccgctgcgaacatcaatctttatgtagttgatcgggcgaaagtaatagctcccgtacaagttcttgcacttctgtccgaagtggtaattgactggaactttggtttcctcaaagactggaccggagtcaagattccatccagatttgtcgaagatatcaaaagcgtgaagacggcacattcgccttctgtagttgcgagtttggtagcgaacggctcagcctctatgcgcgagttggaagagtattattcgactcaagatgcatttaagatgatagacatcatgacggcgaagagcgtgaacgaggccttggcgtcagaggcatcgcacaacagaatcaaaaagggataattcctaaccgggcctgggaaggctatactagacctgccaaatcagaggctttcccatgtccaatatttctctaacatcagcaaaagctcccgacagaacgcgactgatcgccgctcttgacgctcggtcgcgacgggatgctctagatttcgaagtaatgataccggctcaggttgttcaatatgaccggaccgagaatatcgcgacgattcaacctctcatcacctgggttgacacggaacacaatgccgtccaaaggcaccagctggtggatattcctgtaatttccatgggggctggcggcttccacataagtttcccgattcagcaaggtgacataggctggatttatgcggccgaccgcgacacgtctcagttcctggagtcgttgtcaatgtcgaagccgaacaccggccgcatccataagttcgagcacggcctgttcatcccggacgtattccgtcgatacaccatcaattccgaagattcggccgctatggtcatacaatcgacttctggagcgaccagaatttcgattcgcggcgataacatcaagataactgcgccgtcgaacgttactgtggatactccgcaggcgaacttcaccggcaatgtgactatcgctaacaccctggtcgtaaacggcatcaacgtgaacaaccacggccacctcgaaaacaacccgcctgatgcccggacgaaaggcggcatggttgcttaaggagattttcatggcaagttttgatttttctgatttaacagcggggggggggttgtaatggctaactacaactacatcgtcgatactggtgtgatagtcgcagataccgccgacgttctgagcgacgttgaggccgagttccgcgccgccctcggtgccaatatcaacttggccgcgagcactccgcagggatcgcttgtcgcggccgaggccatcgcccgttccagtgtcatgcggaatgaagcgcgaattgccaataccataaacccgaacgtttcattcggaacgttcctggacgcgatctgtgccttgatggggatcgagcgcggttctgatctgtcaaccttcggctatggagttcaagtcaccggccgcagccaaacccgcatttccaccgggtctagggtccagactccggccggcgcgatcttcacagtgatgagcgatgtcacgatccctgctggtggtgtcgcgaccatcgatatcaaatcgcaggagtatggcaacattcctctgccggtcgggaatctcatcatcatcgacggaacaattggatggtccggagcaaaagtcatcgcctccactcgcgtcgatccgggcagccgccaaatgagcgatgcagagttgaagaatgcccgcgttaatcgattggccatccaaggccgcaactcgactatggccatcaaggcgtatgtgagcgccgttccaaacgtcacgtcggtgaacgtaatcgagaacaacaccggcgccgttcaagtggtgaatggagtctcgtttacccttccgtatgctgtttgggtctgtgtcgccggaaacccggataaacaagcagtcgccgatgcgttgtgggccgcccataacggcggaactccatgggactatggtgcgacgaacaacggcgtcccggtggacggtccgaatggcgttcctgtgcgcgatccggcgtccggtcgaaagtatgtcgtgaagtggaccactccaattatgtacgatggatatgttaacgtaacagtccagcaaggttcctcctctgtagctccggaagccattcagaacgcagtggtcaattacgcccaggggaaagtggaaggggaagaggggctggtggtgggcgcgagcctgtcggcattcgaagtcgccggcgccatcgctcgcgaaattcccggcatctacatcaaactctgccaggtcgcgtgcgtcgcggctggctcgccggctccggctccgggcgatttcacttcggaatacgtcatgagcgcattcggccaggctaccatttccgttggtaacgttcgggtgactttcgtatgactctgcctgcgtacaattcggacatccaacaagctctgaaatggctccataaccaggcgcctggaatcaccggcctgatccagagaaaggcgcaatggtatgacagattcagccgccaattctgggccaactgggagcgcgacgttttccaattgaaaactgccaacccgttcggccttatggtttggtgcatcatcctcggcacgccttcgaaagggttcggcctttatccaaaaaacagttcttgggcattcggtcggctacgccagaacttcatctatagcggtacacaagttccgccaccggcagacgcatcgcctggcggcaacttctacggtggcggcaatgccgaaattctcaacttggacgaaatcaggaaagtacttcagctaagatatgtagcgctgatttctaacggctcgattgcatatgtcaatcgcatgcttcgttacatattcaatgatgatgagccatgggacgaggcgaccggtctgtacttctatctcatggactcaaccggcgagaatggccctgtggagaacttggcgatatatcggaaagattgggaaggtatggtgctgttgtccagttcgcccagaacgaaccacgtgctgacatcgacccctgccagcgacgccgattggccgggagtcgatccggccgcgagcggtattccggtaacggtcgaaacggcgtccgctacggccccggacggctccgctacggtgtgcaagcttactaagccggccgggagtaccgcttacgtctccgcgccgatagatgggccgctggggtccggtagcactgtaacgttctcgttcttcgcgaaagccggctccacccgtttcattgcaattcagtcggctgccgatttccccagtcgagccgatgccgttttcgacctggattccgggaacgtaatcagcgatcagatgctggacagcagcgtggtaagcgcccgaatgattcgtctggaaaatggctggtggcgttgcgttctcacgaccaagaccgtcagctcttcgttccgcgctgcttacgtcgctccggcagaaaccaacttcagctggattgattcgaattccagcgcggcgattgacgtgcttatctggggcgctcagatcgaactgggtgatactccaactggatacttggaaactaccggggcgcccgtaaccatgaccgattatgttttgcagaccgcccagaccggaacagtcaagttcacacagccccttccgaccggagtagaagcgtattggactggagactggaaaggcgggactgcagcagaaccggccagattcgcagtcgggaatgggactcaggatacgtttactctgtcagaccccgcatacatcggcctacccaccagtggggcgttcaagctagaatacagggttggtccggcgcttaatctgtcgccgcaattgatcaacctcatgaatgaccgggcagttggtattatgccgacttgcgccggttgcgatgtcaaagtcattcaggagtaatgacgtgatcacacccgacctgatccccagtccgtttgccgctcagggcgataaagacccgattccacaaacctcctccactggcttcgcaaaccttcgcgacggctatacgccggactacgaaatcagcctggcgtcgaacaacccgcaggccaaagcggtcgagcggaaaattcaaaaccaactcttcttcatcgcgacccagaacgcacaggcgtggcagcgacaaatggcaccgccgtggtttcagggcatgcctggcggctacgaacagaatgcagaagtcgtgcgcgtcggaaatgacggcataatgcggcgttatcgttccatggtgaatgccaatgcgagcgaccctctcagcagcacgacttgggaagaacaacccgcatggtcggcgatgcgctccaacatcccgatgccggccggaggcccaggcctatcttctggcggagaagtcatcacgaccggccgcaacttcaacgacctgttaaatgggacgtgggagttcttctctgattcagtggttatcgcttctcagaatgcccccgtatatccggcttccgctggtgccgctgctggcatgttggaggcgaaatcttgggtgtccggagccaatacgttctgcgtccaacgctacactgatcgcgtcgggaacgtcgctgtgcgcgggcttaatgccggagcgtggaccaactggatgtatgcggtaaacgtcatggcccttcaacaaggtcgggtcacctatggagtcgcggccggatcggcgaacgcttacacgttgacgctagttccgcagctccaaggcggcctggtggatggcatgattcttcgggtcaagttcaacaccatgaacaccggcgcctccaccatcaacgtctccggactcggcgccaaagccatcgtcggcgcggccaacttccctctcaccggcggcgaacttggccaaggactcatcgctgagcttgtattcgacgcagcaggcgaccgctggagaatcctcgcaggcgcgccacgcatccaagttggcaacgccgatcaagattaccaggcccccagctggaaacaggtgaaggattacgtcgcgtcccaaaagctgactgaagtggactgggctgacgtcgtcaacaagccgaacgtcgctatccaagacactacgccgtggttcgccaatctggagctgtctgacgctcggcctttcatcgatttccacttcaacaacaaccgcgccaaagacttcgactatcgctttatctctgaagctgatgggtcgatggcgttctactctcgccaggggtcagctggtcctacccaggatatcctgttcagcaggtcgaatgttacattcctccagccgcgactggatgttgcgaaaaacctcgcgtacatcgcgaactctggtcccctttggcagaacaccaccgccgatcagcccggctggaagttcactttcgcacaaggtgtggacgccaacaacaacgcggttatcgcagtcaataccaccaatccggacggctcctatcgctcacagatcatgcgatgggactgggcgtccacgaacgtcatattcaacaatcgtccgctctttgccggtcaatacactccttgggattctggaaactttgatccctccaccaagttgactgtgaatgccacgaaccaaatcgccggcccgaccgggattcggaatacaaacggcaacaccggcaacatgaacacatggggctccagttccacgacggcttcatacggaaacgctgctcttcaaatcttcgggaaaggtggtggcgagcctgccgcgctttatttcgacaactcccagacaggatggtatctggggatggacaaggatggacagctcaagcgggccggctggtcgctcggcaataacgcctacgtgattaccgacgaatccaacattcgtttccacgtgaattccatggctggcactcctgtttggggcggaaacgaattctgggggccgtggaactttaatccgaacaccaagctgaccatcaaagccggcacccaggaaactagcagcactgcgatattcagcggaactatgccattcgctccaatcgcatcgctgtccgattattctcaggcccctttgacggtttacaacgcgccaaccggtccgtctgcaaaaccggccgtcatcgcgttcattcgtcctggcaactggggcgcgttcttcggcatcgataccgacaacaagctgaaatggggcggcggatcgctcggcaacagttccagggaaatcgccgattccagcaacatcatgaatctttgggcggccaacccgaccgcgccgtcctggaacggccaaaccgtttggcgatccggaaactttgatccggcgacgaaagtggatttgaacgccgcgaacgccaccaacggcaacatgatcttcaaccgcatttctggaactggtagcggcatagcttcgtcaggtcgagttggcgccatcaacctgcagaatggggcgcattcggggcaagcggcagcagtcactttcgagcggggcggcagtatcttcgtcaacttcggcttggataccgacaacgttctcaaagtaggtggcggaaacctgggggcaaatgcctatccggtcatccacgccgggaactacaataactacatcaaccaggcgctggttcaggtgggtcttggcggagtcggttcctatggcatctttgcggttctggacaatgccgctccaaccgcgaccgttcaaccgggagtggttgtggacggttccattctcatctactcgtcttgcgccgcaaactacaatagcggccaaaggcctgccggaacttggcgctgcatgggatatgtagtcaaccgggatgccaacactcctgactccgcgacccttttccagcgagtgacgtaaaatgaaatggacgcggatcagaaaccctcgttggctggatgaaacaaacatccacgccatggtgactttcgaggggatcggggaagttcctttcactgccaatccgcacgacgtggaggcccacggaagggccatccacgctgcgatcctgtccggggagcacggacctatcgccccggtagattcgacgcgggagaaggccttgcaggacgctatacgagcaagggaaaagcgggctatccttcgcgatacccgctggcccatagatcgtcacgacgagcagaggcggctgggtatcgaaaccacggacggacctgggctgatagcagctcttgtttcctggaggcagcagattcgcgattggaatagcggggatcggccgcgacttcccatggctctgaaaacgatgtttaaaaatcaggagtattgatgaaaatcacgaaggatattctgatcaccggaaccggttgcaccacggatcgggcgatcaagtggctggatgatgtccaggcggctatggacaagttccacatcgagtcgccgcgagccattgcggcctacctagccaacatcggcgtcgagtccggtggactggtgagtctagtggagaatctcaactacagcgcccaaggattggccaacacatggccgcgccggtacgcagtagacccgcgagtccgcccgtatgtcccgaatgctctggcgaatcgtctggcccgaaacccggttgccatcgccaacaacgtgtacgcggatcgcatgggcaatggatgcgagcaggatggcgatggttggaagtatcgcgggcgcggcttaatccagctgaccgggaagtcgaactattctctgttcgccgaagactccggcatggacgttctggagaagccggagcttctggaaactccggccggcgcgtcgatgtcttcggcctggttcttctggcgcaatcgctgcatccccatggcggaatccaacaacttctccatggtcgtgaaaaccatcaacggcgccgcgccgaacgatgcgaaccatggccagctccggatcaaccgttatatgaagaccatcgccgcgatcaatcaaggctcctgatattcgcccaaaagaaaaggccgcttattcagcggcctttttgctttccggctttgcctcttcaaccatcttgacttcaaccggcgcggcggactcttcctgagtgaccgaatccacatagttccctagtgaactcagaacgccgattaacagcgctcttaccaccttgtccttgactgtctcgcctatgatcttggtcagaacggatattaactcttcccggagtctggggctgattcttggccgaaagcgcttgcgatgctctttgcgtttcatgtttagtcctctgtctgcggtcttctcctcaccccgataatggcttggggatgcgctgtgttaatcggaaggttcgggcgctattataactcgtcgaaaatgctcgcgcttaactgtttaacgatacgcaccgcgatattaaatcgccttctttctggccaaggaactctggcggccgggtccggtctaaggcctaatttgtcgacattaaaacgagaaaacccggatcgcctgtagggcaatgcgtccgggtttatttctatctagtgtacgctaggatcagtgacttccgccccacccgtccagccagcaatcgaagacggcgtgcctcggcttgtccttggcgccatgggagaagtgcttgaaccggatgacctggcccttgagatactccctgtcattccagcggcgctgtttctcgtcgtgggtcaggctggaggccgacacgttgaaagtgactccaggccacagacgttcgttgcggcagactaacgcaccgaccattccggacggcgacaggttttctgcgtggctggagcgggccgtgtggccaagttcattgatgaaagcttcattgttgttgtgcatcaactcttccacgtcgatgatctcagcttcatcgtagtcgtatcgcttgactttcacacagtgcccttccttggcagtcgagcgaccgaacttgtacagcccatcagcgcgcttgcccatggaaccttcgaatcccagcattgtgtggcggcgctcgacttcgctgaactgttcgatggaagtcaccagttcctgctcgaccaggtgaatcctctcatagccgaggcagtgacgaaggaagttcacgcgctcggccgccctggctaggcgatcttcggtcggtgcgcgaggatcggtgaaatcatcgaacacatggaaagaccagtccggctcaccgctgtggcggcgaagatcgccggacgacttctggaaaactttcgggtcgctgatgtcgccgcagaccagctcgccgtccaggccgttgaacagtttatcgctgaggtattcgtagatcgattgattgttctgccgcttgagttgacgagtcagcgcctcgccttcgaatacgaagcagcgaaatccatcgatcttcggcgagaaatacatcggcagttggccttccagcagcttcgggtcaaaattcgatgcgagcatgggtttcatacagttctccagaaaagaagcccggcgaaccgggctaaatggcggtaagccggctcagatggtttcgttggcgtggttcagttcggccatgatcgacgcatagcgctcgtccgactccttgatgaacacgccgtcgtacatgacgcctttgcgatccttgatggtgtcgtaggccgcagcgtagcaggcgagcatggtagtgtcgtgctcttccgtcacatcgaacagagtcatgacggccaagaccaggctcttgatggctaatccatgatttccgcgtgccagcgcgccggccagatgtccgaggtgctgcaaatcgtcgccgtaggtgggatgaacttcgacagtctcgctgaagaccgatagatgatcgaacagattttcaccgagttgcgcggccatgatcgtggcaaccaccattacgtcgccgatgccgtctttcacctcgactggtttgttataaacccaggcttcgcaaacttctgcgaactcttcgaccaacttcaggaattgatccttggccgaagagcctttgatcaggttccggtcggaaccccatttaacaaccaggtcgtgaagttcgcgactcatgatttgttcgatattcattctttcgattccttttggatttgggattttactgcgttgattatggacgccgtgctctggcgcgatccatccttggtggtgccgaagtagaaggccattaccgacttcagctcggcgaaccaatagccgatgatggtgccgatggcgacagaggatgtcgggtccatcagagcctcgcggccgaatgtgaagattgcgatgatgatgagaatggagcctgtcagaagagcgaatgtaatcgccgggcgaacgaaatcgttctgctgcgccgcaagcctcctcgcagaatccctgtcggccgcctctgcggcgaactggctaagctcggcctggagctggttctgctcagactgaaggcgattttgttcggcttgaatcgcaagctcctggagacgaacgcgctcggcgctctggagttcggcgagacgcgctagagcttccggattcgcgtctagagcgctagcgaccgaggctgggtcggccttcgaccccagcgccgtcgcgacgatagcgcccacggcggcgcctgcaggcccacccaggagcgaacccagagccggggcagccgcgccgatcttactacctatgtctttccagtccatttcgactcctcaaaagaaaggcgccattacagcgcctttctccggccggtgatttagaactcttcggcttcggtcgcatcgccgacgccaccggcgtcactgcgaggctgttcctgcttgctgtagtccaccttcacctcgccgccgacgaacgacttgtacaggtcggccgcagccttgaagtgatcctggttcttcaccaggccttccagctcgaactggacgccggaccagctacccttgtcgttcgacatgcctacggtggtcatgcggaccaggttggcgaaagtcggcggggtgcgcaggccctgcggggtctgaacctttttctgggacagcgcggtcatgagcttcttcgaggccttgatctgcgaagacgacagggagatcagagcctggccgaaatcgccggtgtccggatcgatgacgatgacgtaatgaccacgggtgtcggcgaagtagtcagacttcttgtcgctgaccgaaccgtcttcgttcggcgcgtacaggcgtccttcgacttccttcaccttggtcgggtctttcatcatttccttgaagtcttcgacgctgatggaccctttgaacccgccctcggcctcgcgcccagcccagcggatgaactcgcgacgatacgcggccggaatgatcagcaggccggtcttgccgtcgtaaatcttgccggtgacggtgttcaggaacatgccggccttcgcgccttcgatgtacttcgggtcatcttcatcgacctggggagacatcttctgcagaacctggatgaaggggatggcataggactcggcatcggcgccttcgaagcctgcgccgtcatacgatcccaaatccatgaagtcgggaacttcggtagttgcgacggcgccgccaccggtggcaactgctacggccttggtttcttcggttgcttcggaagtttcggttttcttaccagccatgttaggctccttgtttgtcgaatttcagttatcgctaactgtgggtttataataacggaagttgcaactaagtaaagcaaattacatattaagatttgctctttttcaccttcggtttcgtgattttggcctctttgtattcgtgcacgccgatgaaatctggcagctcttcgcccttctccaaatactcgcgaccgaacgcctggagggtctggtagtggacatcgcggttgatggtggcgtcatagccggcctcaatgatagcctcggccgccttcttcgcatcttccatttcgccgcgaccgaattcggccagaaccttggtcttgatgatgccgtcgttgtcggtttcttccagccacttccagaacttcgatttgttctcttctttgacggaaatgatggccttcggctctacttttaccgtgcgaccgtccgccagagtagtggtcttctgaccaagctcctccaacagctccggaatggtgttacgcttgagggtcttcagctcctcttccttttcggccagcgccttttgaagatcgaggatttcgccgtccagctgcgaagccttgtccaccaagttcagcagtcgatggccgatgtcggtggcttcaaccgccatttcatccatgacgccaaaatagtcgatttcgcccggcgcgttctctttcaagtattccgggatttcaagctcttgctctttcatgtccgcctccaacttagtgatgttcccttacttgaaccaagtattgagtagatattatgccgcatcttccttgatacggctactgatttacatattaaatttcgtcgcgagtgctaacgtcagcctcaaacacgccatcaacgacataacttgccaggttgcgtttccactccaagctgacctggattttctcgtcgatggaatccagacagatcaggtcgaagtacaaaaccgagttgacggtgccgattcggtgatttcggtcttcggactgcatccgcaactcgttgtcttcgtcggtcgtgtagtaaatggccacgtctgcggcggtgagcgtgatcccgatccctgctgcggccgggttgcccaggaacacctggacgcgcttggcctggaaatcgtcgatcaatttttcccgctcggcctctttggtctcgccgtagtatgtgccaaacgaaattccttgggcctccagatacgccttgatctggtcgatttcctgaatgcgcatggcccagatgatgatggagcgctccgggtcttcctccagcagaccctccagaagatcagtaaacacggcgaatcgcgggttgtcttcgggcggcaggatcaccggctcgccatagacgttgatatagccggatgcaacttgcttgagcttcgaacgcgctgccgcagcatcgaaagatacgtccagcatgaagtcttcgttcttgagaacgaagtggtagtcttcttccacgcgctggtaaacctttcgttgctccggcgacatttcgaagtatatgcgcttgtacaccttgtccggcaggaatgggagtgcttccttcttcgtgacccggaaactgtgcggctcgatcagagaccgcagcttgtccaggttccggaataccgggcgcccacactcgtctttttcgaccagttgcggcggcatggtttgcttcccttccagcttgcgcatgatagcgatcatgcgaggatcgtcacttggcaccagaacggaaaattcggccacgaacgcccgataggatttcgtcccaagaatgccatcgcgcaagaattggaactgcatgaacaaatcggtaggcgcccgcgttagaggagttccggaaagaatgcgacgggcaacggccttctcacccagctttacgatctttttcgcacgcttggcttgcgggtttttgatcctcgtggactcgtcaacaattgcgcaaaccttgaaagtttcaaggaatcgcaagacttcatcatagccagcctggtgattgatggcgtcaacgttgatggcgaagacgcgaagaactttttcatctgcgaacgtctcggcatacagacgatccaagcgcgccctggcctttttggaagtcggtcggccacgccaatccacgctcaaagtcttgatcgcgacgtgtgtgggaatctcgcgcagaatccagttagtgtggacccctttgggggcgacgatgagcagcgcgtcaacgcgcccctgtaggaagaggcgaacggcatcggccaaagtcgtccaagtcttcccggtgccctgctccatcaggtatgcgaaattccgtttgttcagggacgcggccagggcattgaactggtgctgcatggcctcggtcttcatgcccttgacgggatatgttttggctttcatttgttctccaaatcggcgaggaactgaacgatgttgtccagtccttctgcatagctcgcaacttccaccaaatcgcggctgttaagctcgaacaaatcgagcataggattcagcagcagccaatcggttccgatctttgccaggacaaagccccggccgccccagccgatccgctcccgaaggaatgggatttgcccaggctcgaaacatcttgccattgggcaggtggaggcgcgtttcggccactcctccaacgccttgaactcgacccagaactggacgcctcgacgattcaggcaaatcgaatcggacataccagaccgccgcgtctccagaaagtcgatcaggattcggccgagcgagcgttgcttaaacgtattcgccgctttcgtttcgcgatcattcatcgccttcgccctctttggaaactttcttagtttgctcttccagtttggccttctcgcgctcggtcaatatccgtttgatggccttcacgatgaacatgtcgatgccgctgagcttccagcctttgatcaggaaccaagagccggtcggcgtcccttcggctatctgctttccgtatcgcagatatttctcaggcctgatacggaatcggatttgttgatcaaccgaatcatccacacacatgatgtcgaggaactgcgactggcccttgtacaccgggtttttcccttggtcagccctcttcttctggcgaatcggttcgttctcatcggacagaactttcttcaccatcttgacgatgactaggccatcgtctccatcgcggatatcccgaatgttctgaatggggtttccggaagtcactccaaccagctccggattgtcataagcatgaccccagagcgtgtgagcttcgttcaagtctgcgaattgcacttcagaattcgacaaactagcggcgactttctcccaatcctgaagcgtcttcaggtgggagccggccagctccttatattgggccttcatctctttcagatcggcctttagctccttcagatcggccttcaacagtttctccagttctttgtctcggctgattttcgccgaaagaatctgggcttccagcgctgctacatcagcagccttgtcatcaacatcctgcgccgatatcgggcaattagccatggcgatccttgcggccttaacttcctcgcgaaggcgcaggaacctctcggctttcgccgggccgaagcctttggcgttcatgatgccgccgatcaggcgcccgtccgccactacccagttaagttcggaatgctccgggtccagggccgtatattctacgccttccttggccaattcgcgaaggatggacacagtttgctggtcgtctttcgccgcccgaagacacgcggccgcgtattccaggcgatgataccgcttcatgtagcaggtccagtacgtcaccacagcgtagctgaccgagtgggagcggttgaatccccaggcgccgaatgtcaccatttcctgccacacacggtgagcatcgtccggggcgacgcctatggtcttggcaccctcgatgaacaattcccggcgcttgttgaagaactcttcaccctttcgcgcagacatggctttccggattgccgatgtctgctcccagtcgaactgtccgatgtccttgacgatggacatgatctgttcctgatataggaagacgccgtacgtccctgacagatattgctcgacctgcggaatggtataggtcacaggctcgcggccggccacgcgctcgatatacttggtggccataccagaagacaacggacccggacgggcgagcgccgtgatgtggtcgatgttttcgaacgcggtgatattgatcgcgtttgcgaccgaacgaactgcctgcccttcgaactggaaaatgccggacattttgtcttcgttgagaacatccagaaccgccttgtcgttcaaaggcaagtcgtacaactcctgcgcagtcacacagttcgcgtcctggatgacgcccagagttcgaaggccgagcgcatcgatcttgaggagattcaaatattccgaatccggcttatcgagctgcgcgacgccttcagaagttaccgtacagaagtcgataacttcatcgttgcagaccaggatgcctgccgcgtgtacgccagagtgggatgggtgaatttcgaggtcgcccatgcaggcggacgcgatctcatacttttcgcggaagtcgcggccgggctgagttttctcgaaagtgtcctccaatccttttccatatcgttcgtccgccgacgtatattcaatgatcgagtttttgatgttgtctgtatcgtggaaggggatgccgaagcgctttccgacgtgagcgataaccgacgcggccttgagcgtgttgatgttgcccaacttcaccacgttccaagtgccatacttctgctggagatattcgaacactagatagcgatgggtatcggcgaagtcgatatctatatcgggaagatcggaccgggaaatgtcgataaagcgctggaagagaaggcgatgagggagcgggtcaacctcggtaatgccaaggagatagcagaccaaagagccggccgaagagccgcgagctgggccgaccagcatatgcttcttggcgaacgcgaccagatctgccacgaccaggaagtagctgtcgaaatctttcagctgaatctgcttgatctcttcttggaatcgatcctcatactcctgggtccattccttgatgtggccgcgactgagacggtaggcttgcccctcgcgagccagcgcgacgatatccccatccaggtggatcataggcgccttcgccagtttcacatccgccaattgttcgactaccgcacgagtattggcggcggcggcatcgaactcttcgcgagtcatgatgtggcgtaaacggctccacaactcctcttcggtggcgatgtggcgaaggccgaccgattcccgcaccttccaggccgacgcgaaatcagcatggtcgatggacggcatgtcgttgtaagaggtaattaccaccggctttccgaatgccctggccgtctccatagcgccgtgcgcggcgaccatcgacgcgggattgatgtcaatgtagtcgattccggccagatccagatgggcataggcctcgccagcgaatttgatgacgccgtcagcttcctggaattcttgcggagtcaatccttgattctggaccgacttggaagtcaagcggtagaacttcttggtgtccttggcgagcacccaggctttgagcttcagctctttctcgccatcgtcggcgcatttgatcgggatttccatgccgaatccgcgaggcagttctgccttggtagcggcttgttcccaacggacgtggccccatgttccatcatcgacgatggcgacgaatggggattcgatctctttggcgcgctcgatgatctccgggaatcgaccatatgcggcgccgtaggagtaaccagagcgaacgcggagctgagggaaagacatcatgcggcctccattgcttgatacgcccgatacactcccatgctcttgcagacttcgtggagcagccgcacgtcgtcgagcgcccggtgtttctgtacatatgggccgcagtagtgctcataaagatgttgcagccgcatgcggtggccgaacaacggcgccgactcttccacagtacagatatcgagcgatgggaaattgacttcgtccaggccgaacttgccgcgagccagatcgcaggtcagcatgaacttatcgaatggcaggttgtgggcaatattcgcgtcggctctggaaaagaagtcgcgaactttctggcgctgatcgaggaaagatgggtgcttgatcaggtcttcgttcttcaacccggtgatcttggtgatgatttcctcgataacgattccaggattgcagatgaactctacttcatccaaaatcttttcgccatcagttatcacgccggcgaattcgatgattctcggctgctttctcagactcaccctttggtggaacgggagtcctgtggtctcagtatcccatacagcgaatatcatgtttgttccctcttatgtcgaaaggccggctgctttcgcgaccggcctgaggagtataccgcgacggctgaagatttacgccttctgtccgtctttcggcgtgatgcggccggagtgcatggtggcgtgaacaaacgccgaatagttgatcgagtccaaggccgaatcggcatccttgaacccgctattcgccaggcgagtgagtttgcccaccatatgcatcacgaacagggcgagccgatggtcatctgcggtcttcgccaccaggccgttcgggaagaggatttccatgatctttccgtacatcaggtcattgcgaccataggtgctctggcgggcgcggaagacttctgctgctgcgtacagattgttgaggacatcttccgcgaaatcatcgggatgagcgtcatcttcgccaggccagacggattccatggcgaacggcgcggcgtcttcggtcgggtcttcggactgagccgtttcagcgagcggagacggggctttcgcaaacgcctcgtcgagggtaggggcggagttcggggcggccgggaacggctcgcctgccatgttgtttggcgcgctatcggggtcgctatcggccgcgacggcgaagaacggcgcatcgcaaccttccaggttcaggatgtaggagtcgatccccaggctattgtaggcatcgatgatgtcctggcgatcatcgaacgccgcgacgatcttggtgacgccttcgattttcttcaggatgtcgagcgcgactgcccgcttgaactgaggtgccggctcggtgttaccatacggccgcatgatgagttcatactcgcgatgttcggcgatgccgagttcgcggtggagcttggccctggtctggaaaaagtggttgtcggttcggccggtgacgaagaaaatcatgaggtcggcgtcgatggcattcctgatgcgacctacagcgtgcgggttgagagtgtccttgtcgagacgagaatgatactcgtcccattgccgttccaaggcgaagctcttgcggtggctatcgtcgaatacgcagccgtccaggtcgaagatgatgatgccattctttggtttgcgttccatattcagatttccttactggttgctttctgggtgacggttttatcgatgaacgtcccatcagaagtgaggcggaaaacttcgccattctggatgaaatcgaacgattgcacgttcatcgtgatgcgaatggattcgctgccgttggtcacttcgacttgtgcgatgtcgccaactttctcgacaatgatcttcatgttacatggacttcccattgacggccacagggttggcctcttgtttttccgatacccagaaatcgcggcgcagttcttcctgctcggccgagcgatccatccaggggcgatagaacttgcactggtagataggttccaacggaacatcaatcacaggaatctgacctggcttcgtctccagagcggccatgaaccggtcataggatttctgctggatttcctcttcattcatcaccttcgacccatagcgcgggaaggcgcaggagccggtggcgacgcagtgcggctggagcaggctgtcgaacataggatagacttccagaaccagccggcgcatttcgcggaatacttcctgatattcaccctgggtccgaacgcacaggcgaaccttcgccatgtcgctgagagtccgcagattgaacttggccgcgatcttcgtttccatgttggaaggaatgattgcgcgagcgtcctggagcgacgcgccggcctccagcagcttctggtaacttgtctgcgcgtctgcgatggcgtcatgccacaggcggttcagctcttcgcggacgtggtaggtcgggtcatgctcgccattgaccgtagccggttcgtcgaattcccagcggaatgcttccggctgaacgacggcgctgatttccagagcgcgactggtttcctgctggtaagccccggtgcgagtccgaacgagttgatgggtgaaattcttgctgacgccctcgatctggaaaatgaagtccacgaactcgaacggcgagcggatggtgtccagcatgtacttccagtggtcgagcttttcggcctcggtcatggtcgccgggtcttggccgcgcatgcgggtggacttcgttcccaagagcaattcccaggcgttctgggtgtaactaatcagagaaatcttcatcagaaatcttccggaattggcgtgaagtggaatttttcggtgagagccagggccaggccttgggcttgctccctgttaaggccatactgctctatctcttccttgagcagttcgcaggcctccagacgcgcctcatactcttcagcctcatggacggatgagaagacggctccatcagaggttcggtacacaagttcgatcgccatggtgacctcagtagcagcggatgatttcggcgcggatgtcgcgacggtcgaggtagtgctcacgaatcttgtcgcgggcacgctcggcctcttcgcggctgccgaacgacaggttgaacgacgtgaaaggcttatcatccagttcagcgccggtctgatacaggattcctaccagaacgaaagacggcgcggtcttcggctgctggtcggtttgcagttcgagaaaggacatagggagacctcttcaggatgatctggtgcgtacattaatagcgctcctgctgagcagctacggtttccggctcatagatgagcatgtcaacgatttccgggcactggcctttcacccagtcgatggccgcgaccagtgcggtggaagcggagaaagagaaagtgcggtaagactcatggatgtacggcgaccccatggaatcgcgctcggtggtgcgcgaaatgactgctttgatattaacgatccggcccatcttcggcctccactttagcgattatatcggacaggcttaacttctcgccattcaggaaataactggcgcgaaacttcctgtcgccctctggcccgacgattcgggccgttattgtgagactcccgccgccaagggcatcggtgtccctgaagaaagctagcagcgcccgcttgagcgctgcttcgcgaggatcgacggccattaacctaccacgttccagccgtgctgagcgcaccacacggcaccggtccctgcaggaagactattcagaaggaacacaggagtcaggcggccatcctcggtcatatggacgaagtagcgggcgccttcaccgagccactcggccttggcgatggcacgttcgagattggccttggtggcgtaggtcttggtgtggttcttgtcggtggagaaggttacttcgcgggccatttgtagattccttttggttgaagggtttcgcgtttcgatgagggaatattacgcccacctgatccagaagtaaagcacttttgtaaattacttcacgaacattttcttggccttctgataagacgaagaagtcatcaggcgctcgatgacgtccatgtcagaaaccagatcgtccagaaggacgttgcgccaggtagcgaaccggccgagcgagaagatgccggcttcatgggtgagattccagatcatggattcgcgctcgtcgcggccgagcggaacgattttgcctttggtctggatggtcggctcgccgtcctcgatgagatgccttttcctgatgccgaaggccgcgcaaacgtaatccatatcccagtcgctgtcccattcgatggtttcgattttaccatctaaagtctccactatccccttagtgatggattcgacgatcagagtatcaccggtgatggacgctcgaaacgttcccactttaggaccagggaaatacacggtctggaagacatcacaggggatggaaagcttgtatcgactcacgatgatggaggttccttcaccgaatgacgggtcgattcccaggtccagccctgccgcagccagattggcgcggaacggcgcggtgctgatgatattcacgtggtcatcttgccggcgaagatactggaagaaagaggagtcgaaaggacggctccaagtgatacgattcgcaagcttagccaccagctgctcatagtagtcggccggtgcgatccaacgcttttcagtcgccagattccagatggaccggtccgacaggccgcccgttactttcctggagtacatgttgcagtggtcgatgcgcggctgggaaatgaactcgccgtcgaggtagatagctttgtgtacagtgacttcgcggaacgggatgccggtgagttggccaatcactggcgagcggaatcgcagaagtgcgttgtggcgctccttattctccggcgtcgccgcgtcgatgatttgggcttgaggaaagcgatgcgcggcgatcagtccggcgagtccggcacctacgatgattactttctgatcaggaatcatgatgtgtcccttatgagtgtacaaaacttgagaggataaaaaagggacccattttcatgagtcccttgaagagctagacgattcaggctcagaggagcggcggcttactcctcctcaccttcggaaccatcggcgccctgatcttcaccgtcgtgctcctggccttcgtcatcggccttctcgtcatcgccctggccagcttcgtcttccttcgaagcgatggcaaccagatcgacccagcccatgatttccagcttgctcaggtagctgcggaccgaagtgccatagagcagatgggccaccttttcgccgaaggattcgatttcgaccggctcaccaacggtgcagtgctcgttgatgtatgcgaacaccttgccgcgagtcgagaaggcctgcggagtgccatggccgtcgccggtcgggatgaagtgagtggcgcgggggcgacgcgagccgttggacttcaggtcttcgcggcgggcttcggccttcttgcggcgctcttcctgctcttccttgcggcgctgcttctcggcttcgcgctcagccttcttctgctcggccaggcgcttgcgctcttcttcgcgagcgactttctgagcttcctgggcggccttcttctcttcggcctttttggctcgctcggcttccttctcggccttcttctgctcgcgctcggcttccttggccttcgccttctcggcctgctcggcttccttcgccttggccttttcagcacgctcggcttccttggcggcggccttttccttcgccttctcggcgcgctcggcttccttcttctcacgctcggccttgcgcttctcttcgcgctcggctttcttctgttcggcttccttggccttggcctcggccttctcggcgcgctcgcgctctttacgttgacgctcagcggccttctcggccttgcgcagggcggctgcttgttccttggtcagctcttcgccttgggtctgctcgttctggtctttctgttccatgttcttactccgggaatgtttaaagggatggcttattggcctgtgaggggattatctctaaactaattgaagaagggaataccttagcctgaactttcctaaatattttctttcgggaaagtccagactccagggaacttatttatgttcgcgaagtttaactcttgcgcaaaaacaacaagtattcaactgcacgagttatgccagtatacatcaactgactataaggaattgacggtaagttttcttccagcattgcgactcgcttccattccgatccctgcgacttgtggaaagtcatcgcccaaccaaagtcgaatccgccaatggccttctgcgcctccagccgcacatcttcctcggccgaaaagctcaaaggattgaacttcacccagcgctcatagttcgtgccgataatgcgaactttggcaaacagcatttcatccggctcgtcatcatcttcttggccttcggggaccggcttgaagtccagcagaattgcttgctcgccgttcatgatgccatattcgtgctggttcccggtgcacaccagcttctcgccgatttccggttgtacacccttgtagccgaggatgcggcgcgccctggcgttcaagcggcggcgagtattgttgtaggcgcaaaggatcacgccatcgtcatccaggaacgtccgcatttcgtcgtccgacatatcgaagccagcccggactaggatatcatcatactcgcggcagggcaggcgtttgccctggcggacgaacatcgacgctcgaacgatattcccggcgttacgctcgatttcagtcatgactgtgtcgcagctatgttcgtggaaaacctgaacgccgcgcacagggggaacttggccaaagtcgccgatctccagaaccggaattcgatgcgccaacaagcgctcttcatcccactcaccggtcattgacgcctcgtcgagcacgaccaacttcggcttctcgtcgagcgagtctttattggcgaacatgatttcgccgtcttcatcctcgccaatcggccgatagatgaagctgtggagggtccgggcattgatacatcccttctcgcgaagccttgcggccgctttcccggtaggtgcgacgaagaccgtccagtccatcgagcagcaaagttcggcgatgatcttcgcgatggaagtcttaccagtaccagcgaagccggcgagtcgatagacctggcggcggtgcgctcgatcacaccaaccgcgataccagtccacaacggaattgatcgcgtcgatctgctggctgtttggccgaaaaccgaatcgctcttcgatctgatcgacggtgaagttagatgctgacatatttgcgttctccaacgctaggtttaatggaatcgaggctcagtttaagcacgccgtccacagaccagccagtgctacgacgatacttgcggccttgcggatcgacatagaagttcttcgtgcgccgcagcagaacataatgccaagcagctccaagcgcgtggacccttcctttatacgggaaagccttcgcctgctctgcggcctctttggccccagggagccagcggacggtcgaaaggaccaggaccgcccccttaatagcctgggaagcggcgcggccgtcctttgggctatagcgatgtctatcgaagtctacccagtggtggttgccgcgccgaagcttcaccgtccgggatcggccctcaaacaccacagtaccttcgtgagtaaaaatatgttccgccatggaatgttccttataacgtacagttctgctttacctctgcgcaagaagagtatactatcagctgactcgtcaaagcgagcgaatttaatccaactttacttcggcaggaaagtggccgatactagcgccgccgcctgtactgccctccaaaacagaggatacattaaatgcaagaatgcaagatttcccgcgaccaactcccggtcggcaatccgaatcccaatgtcgataagactcgcgacccgaacctaaagcccggctacctgcgtcgcagtcgcgagctggacccggctcttgccgttcgcattcgtcgcgagctgattcatgctgaagcctccgacttggccatggccgggtgggtcaactcccagtccagcctctatggatcgaaagcgttcccgcgccattccgtcgttcgcgtgactgggatggaggaatctgaaacgaacgtcggaatgctcatcggcttcatcgagcaccgcaagcacggtgaatgggcagtcttggaaactgggacgaaagaaggcggcgcgatcaccatcccggtcgagagcatcatgcgtgcgtcattcgcagaggccgaagaattcgccgagaaatggaagcgtaacctggggtggcgcctcctgcgtcagcttcgtgaatgcggcgccctggccgggactgaagacgaattcctgcggcggatcatcaatcgatatgttcgagatcgcacgatcctcgaccaccacaaagtcggcgcagacaaaatctacactgatgcggtgctaaagagcatcggcgaagcatggccgcagattcctgccggaacattcgtcggccaccgagttgcgcaactcctgatcgatcacaaactaggccgagctggcaccatcttgaatgacctggtggacttcctggagaggttcgcggccggtcgtgataaagtgctcaatatcgccatttgtaattgaggtgattggcatgaacaacaaaccgacgctgaatcaccaccatcaaactgcattgttgtatctgtacaacaatcccagtcagccgccattcaccggtcccaataataaggcactgaatgaacttcggcagatggggtatgtaaaggcgaaagagttcgaaaactgggcaggaaccggccgcatcagggctgaatggatgctcaccaaggcgggaatcgagttcgtggacaatgagattcttcggaagtgcgccgcctgcactggcatcggtcagtctttgctgcggggaaaatgcaccgtttgcaatggtagcggccaggtatggatcagcgacgagccgcagcgacactttgaggattaccctcaatgcgctcccaagctcgaaaagaccgatgcgaatcggcttgccgagcaactagaaaccatcgctcgtctggaaaaggaacttgaagaatcggaaaagcgcgggagcgaactggccgcgagctattgcgacggcgtggaagtggagattcatgagctgaagacgaagctggccgagttggagaaacaagagccggtggcatggggagccttccatttcgacgggaagcgcgacggcaagctgtatacgcaatgcgaaactgaggctcagatagaggcgtatatcctcgacatgcaccgaagcagcgactcattgacgctcaggaaaggtcccctctacaccgcgcctgtagtccaggctcaaccaagcgtgcctgatgggtggaaacccgttccgatggaaccgacgtcgcaaatgacattcgtcggccagtcactgcgttatgactcggtaaacagcatcggcgagatttaccggcaaatgctcgccgtagcgccctcacccatcgatccggccgcgcatcctcagccgtgccagcaaccacaggcccatcctgcccgctgcgggtgcgagcggtaagtgccaagtaaggagtttatgtaatggaacagcagaaaccttcggaagtagatggagccatcgccatgaccgatctcgacattcgcattcttcgaaaggcgaagcccgaagcgcaggacgagtgcgccttgtccatgttcgcaacggcgatccgccagaaactgcagcgctcccgcgataaaggccgaggcggctggatcgactgcgacgaagatgttctgatcaacggattcgccgaacatgcgctgaaaggcaatgagaacaacctcctggacctggcgacgttcctgatgttcatgtgggtgcgcggcatcgatgatgcgaagattcccccggcgctcgaaaaggcgcgacagcacaagatcatggaagcctggagtcgaatccatgaagatggcctaaactccgccagaaaggcgagtgctgcgcgacaattcgtggaagtgcctcgacgcaaggggcgcccggagcgacttgcatgaagcctcacgaaataagactggctcaggccgaagaattcctgagagaactcggcagagggattccggacgacgaacgcgtaatggtcggctacgctgaagaggccacagtccagaccgacgaaaacggccgcaagctcaacgcaggctggtggcctgtgccatggaaggaaggcaagtacatcaattccaggtccaacgcctatgcctgtatctcgtcgtccatcaagacgcccaacccgaagaccggacagatgcgatactggcgcggcgaggcctctttcggccacggcctggcgttaatggtcgatgacatcggctccggcaaaggttccaaaggtgacttcgaccgcgacgagttccgcgaacgcctggagccgaccgcgattgtggagacttcgccgaacaactaccagttctggtatttcttcaaagagccgatgtcccacatgcttcagtttaaggcactgctctattcgttcgtggaccaggtgctaaagaaaggcggcgacaacaccgtcaaagatgtcagtcgttatggtcgcatgccattcggcttcaacaacaagcgcgggaaagacggcaagttcaaatatgccgacgaaaacggcaagcccgaactcgtgcgcctgtatcacgcggactattccaagcgctactcgccagaggaaatcgcccaggccttcggcgtccgcatcatcatgccacagatgaagaaggtggaaataaaccgcgacgattgggtttatgaccaagtatggctgaagtatgccgagcacatctgcacgaagtacaagatgggcgaggcagcgggcggccaagtccaacagaatatgtccggcaaatatcgcatccgctgcccgtggggagacgagcacacaaatggcgatccattcggcgcctactttcgcggaccgatccctggagccgagcacgaatatgtgttcggttgcggccacgatacctgccgcaaagagcatcgccggacgtgggcggccttcaccgatgaagtcgtcctgccctatatcgtagaacaattggaacgcattaaccgccgtcacatcggcgaggagtagtaactatgcaaaacgatcctggaatcctgattaccgccatcggcttgctgttcctcggccttatcatcttcttcgaaggcctaaagggatggaaaatacaagtcgcaaacttcctcgcgtcgcttctgtgcttcttcttcggcctttctgctttgacgttctggttcgtcgttgcgtttgacgtattttaatcgacgaacggtacagaaattttcggatggggacggaacttattagctatgccggtttaggtaggagataatagccgtccctttcgcctcaatatgtagaggcaatgttgaatccgatcatgtaaagcagaaggcggcaaacctaacatgattatcgacgaagataatatttttgatgatggcgaatcagggtccagtgagtttgatctcacgcagatagaagatgctggaatggaccctttgatgaccgccgcgagcaaggcggccgatgacgcgattgcgaggaacgaaactcatcgcgcgcaaaaggcggcaagatacgccgaggcgtatgcggaaccagacttgagaaagcgagcgcgattgttgatgctcgaccaggcgttcgatcttccggtcagccgggtggtgaaagggccgttcgatgacttcatcacgaaatacagttcgacttccgacagcaattatctcgcggtatacgatactttgttctgcaagggtgatggaaccgtcccgcatccacacttcgatgagtttcgcggccggctggtggaccatcgtggcgtggcgttcaacaacaagaccctcgacccgattgacctgatgggcgccctcgcggctgcggccttggacgatccctcgatcaagaagacgattgagacttgctgcgtttgggcgcgtcgatatcgccgcaactcgctgatcgagacgtttgagaagaagataccagagtgggacggcgaagagcgaattagcacgttgctgatcgatcttttcaagccgttcgacaccgaattgaaccggatggtcagcaagtatttctggctgagcctgtactgccgcatcaactatcctggaatctcggcgccgatctcgctggcgttgattggtgggcaggatgcggggaaatcctatttcggcctgctgatctgcaaggaactttcgggcggtcgcgatctggctcccgtccagctcgacctgagccggcatgaccagacgccattcctgcgcaacatcactggcaactcggttattgcgaacgtcggtgaaatgtcaggctttaaaaagggcgacatggaacgcatcaaagagttcctggtgcgatcttcggatacattcgaccagaagtttgagccgggcgagacgatcaagcgacaatggatcaccatcatggacggcaacggctacgatggcctccagcgggacgactctggtaaccgacgtttctatcctatgttcgttgcgcagctgcccgacgaggatggaaagccgaactgggtaaagccaggcgatggcaacgaaccgttcaaggtggacttcaccgacttcggccgcaaattctggcaagcgatggccgagtgccgtgcctggatcgaagagcatggcgtagatggctacctgaatatggtgtcggaagcaaaccgcgaagtccagaacttctctatttcggaaatggagaatgcgcgtggcgtggttcgcgacgatacgattgatatgtatctgatcaatgttctgatcagttgccaatttgaggaaattccaatcggaagagcagcaaaaactcctggttggcgagtgaacacagtagaaatcctgaaatggttcgatctattggcaagaaagaggccgatatcccgtcatttgactccacacctgaaagcattgggaatggttcctaacaagaatggattcgcaggatggtgcttgcctgcggagaaagttgttggtggggaactcaatggggctttaccgcctttcaatgacgctctgatatacatagtcagaaagaatgactctgctgttactgatgaagacgctatggctcatatcagaagagtcaaggcagagcgagccaaaatattgggcgaagatttctagtgtactgatgcattgggagtgaattaggccgccttcgggcggtcttttctttggtgcggcgtacattaattttcggcgatgggcggaattggtaggaatgaatacagtaatttggaccagtttcgagcgcgaataatggaaagtcgatagattttcggtatcggtttagtgcgtatggtggctggattttgtgtgaaatgttgagaaatcgtgtgtttgaggtggatttttcgtgggaaatagccgcaagttaccggatagcgattctgagaggtaatttgggacgcctactgccgcgtgggttagcggccaattttctaagtttccggtttttcgagcatgggttaaaactattctacagcgaaaatcgattgcccaatcctaatagaaaaaatctatcacggacgttacctatctttaaaattaataaaattaatagtaatttggtaatttggtatactttagtatttgaaagccttgcggcactaagcctgtacacttcccgtcaagtttccgattccgctcaactcgcggcagggtcgccggaaacttccagacttacaatccattggtcgcggcaacaccacggcggactaagcggcaagcgccaaaactcgacgaacggaaccggaaatttgggagcgcgacagaatcgctcagctggacatatttctaacattcgatttaacactcctcccaaacactcaccaccatcctcacccaccaaccgccgactcgaccctcacccaccagcagaccgcccatataacatcctataacaccacctaacactcattcaccatcaaacccacccagacctacaggccacccacaagcagcccatagacgcgatccctggccccatagtacaatcgcgccatactcagtgtcgcggcagagcaccaggggccatccgccaaccaagccaccacgacgactccagaatcgaactcagggacgcagcaccaaatgaccaaattctacagccccgacgatctagtcacgccacaggaattcgcagacccgcatttcgcggcgatcaaccaaaagcgattcgacctgtacatcgacctgcgcgtccaaggctatagctcctggcgggtcttccgggcgatctggggcgaagagcacatggacgggccggcccaggctcgcatcttcgcgatggagtccaacccgtactatcgcaagcagttcaaagccaaactgaatgcgaccagaacgtccgatctgtggaatccaaagacggcgcttcacgaacttctccagatggttcgcgatcccactgtcaaggactccagccgtctgtcggccatcaaggaattgaacgttctggccgaaatcacgttcgttgacgagtctggcaaaaccagggtcggtcgcggattggcagacttctacgcatcggaagccgaggctcagaccgccaccgtcgctgctgcggccgaagccaatggctatgtacagaacggcgaagagggcgatttcccgtccccgacgccggaaccgaccgaggaagaccgcgccaaccccatttagacataaaataacatcgttctaggcctgaatcggaccgatctaaggcgacggtagcgggtaggggacgaaaaacgattctagggctgttctaggaagccgaccaataacgatcagaagcgacaaagccccggattctagttcagaatccggggctttcttttgggtttcttattctccagcttcgatgatttcgaagttgtatttgacgccttcgtgctcgaaagtcaatttgcctgccgctttcagctgcatgcggaagcggatgtgcttcgaagagggcaggccgaactcgatgaatgctgcgttggtggaccggaactcaccgcgcttccctttgacggtcaccgccacgccatgacgctgggtgcgctttttggagacttccgggtctttccaggagttggcgatggctgcggacaggtctttggcctctttgaccttctccgttgcgttcttcgcctcttcgcgcatcttccggatttcttccagcgcttcctcttcggtgacctcttcctccggcttcagattttcttcttcggccttctcttcttccttcttcttggaagtgcgggttttgtaaaccttggccggggcttcctcttcctggaaagcttcttcctcggccggcagagcgttcaggatggcgaggcagcgacgctcggcggtcttgcggtcggagaagcgctttacagtcgcatcggcgttgtgggcgttgtagaaggcgaccagttctttcatttctgcgttctggatgtcgccgaaggttttgatggagttggtcattttgcgatcctctgttttggaagatttcgttcgggcttaagtttgtcgccccgttgaaagagattatgcctaggtcgatgctgcgtgtctacatttatttcatcagattgatcgcaaagccgacgaacggttgtctgatgtgaaaacaccacagagcgaggctgcggtgttttgtggtggagcgggtggtcagaaagtcgggatggtgataggctcgatgggcggatcgccgggaaggtcgccgggcttttcagcgtccgatacgggaatcggactggacgggatggctccggaccgaagccccagaggttccgggcgcctgcttacctgcggagctggaggcgcgggcggagcttttggcgctttcggcgctggaggcgcgggcggagacatcggcccttctggaagatcgggaagatcgggaagactcggttctttcggctcgtggtagactgtcgcgtcgttgtccggtccggcgggatcgacgcccatgaatggcgtggtgacgcagcgcatgttcggatggttcggcagccttttcagggcgatggagtctgcccagacatacgggttcttgtgtttaccagggccgtggctgatctcggcaggcatgtggccgttcagcgttagccattccgctgtcgcttcactggtcaacgggccaaccatgatatggccggtatcatcctcgatgatggcgaacagattaccacgtttgaattccgtgatccaaaaggcagacttatcctcgccgacgaacgtcagagtttcggtgccgtggtggatatcttgatcttcccagatgtatagcatggtgcgccctcagtaaggttacttggtgtgctcgaccagagacattccggccggaactttgaagcgtatgtattcgatcatcatcgcagttcggcgacgattcgttccggactcgtcattcacgaagagttcgcactggtgcggaatgactcgcgtcaccaatgcttcgcctttcgagccgtagaacttgatgtaggctgcgacgcctcgcgtcatgctcagatggatcgtttcgcagagtcgctgcgcggccgacgcgctggacagatcggtcggactgaccgtcacccagtaatggccactttgttctttatcggacataagctgccctccaatgagaaagcctctgcgactcggcagaggcttgttgttgttagtcgcgcttcaacagaacgactttgtcatatgcgcgatatttaccgcgccagtcttcccagtagtcgccggccgggcaggtaagctccagggtgatttcgtcgcgccagcattcgacagaaaggacaattgccttgttcctggctgcggaatccgccatgagcttaatcagaatttcgtcgccagttttcaactcatcaactcttacaacttttgccatggtgttctcctattgggcagcgccgcgagggcggatcgggtcgatgtcatgtaagcagatggtaggatagtccctggccaacttgagcttgaagtccacccagtcagcgccgatgagtgccgagacttcgatgcttactttgctgtgcggcgcagctccagatcgcaggactatggcccgacgccgaacgggatcgttgacgtcaacatgagtgagtatttcgtcgccgacgagcaactcacaggccatcaatattttggccatcatacacccctatgagaaggcgcggccaggacgatcccagccgcgccgatggattaacgtttgtgaaggatggacactgcgtccacgtcgaggatgctaatggtacggcgacggcgcggattgctgcgttcatggatgcgaatcaggttcgcagctggagcttcgtccaccacccatacgtcttccggtttctgcgtccggagcaggaccgtcacttcagtattctgggcgaggccgttgcagatgaaagtgaacttggacgagggagttctgtacatttcgagattcctttttggacttctggtccggcttctcagccggtgaagagattatgccctgattctcaccgccgagtaaagcatttgtgtaccaattctcccgtcaggtggaaccaaagtgcggtatcgcttatggctacgctaccgcgccatggcccttcttgctcgcacactgcgaaccacaggctgatttccatccttgccaggactcggccgaaagattcgaacctgcgccgactggacaggatgtcgacattcactcgtcgattgacctcataccggcgaccgttgatgacgaagaccagccgcagggtttgtccgtcaagacactcccagtatctggtttcatatcggagccaatagcgcttgccagccgggcctaccatggtcatttaatcgatgctcctggccgcgccacgcggtccggtcggcgggacgggatcgaaccgacccaggatgtagtcgggccggcgcgcttcctgaggacacacggcgagaaggcgccatcctgcgtccagggcagactggagttcgtccgtgcagcagtcttccttgagcagcaggcgattgacgttctggaggttcgggccaggaatagccgaaccggtgagtgaattccagccctcgattccactaaccatctccggttggttgatgtagcttacggacataccggccaaccggctcgcggccagctccagacgctccagcatgggtcgcagagcggcttccgggtcaatgtcgtcccagagaaggaccaggctgatgatggtgtacggatagtcattgtccagatcccaggctgaagcggtcagacggcccaggccgatttcattacacaccacgggaacgtcgttgctccaggtggacggctcccagttccgctcaccaggattcccgattgttacgccttccaggttccccaggagaacgtggagcttgctgacatattccgcctccaaggctttccgctcttcgtcggtctggttgtggcgatagaaggatggagggctgactttggcatggtagagtttcataactgttcctcggttttggaagatttgaaagttagagaatggtgtcgcagtatttctcgaaaggactctggcgcttcttctcgcagatcgcgcaggtgatttccaggtcgggcagctcgctgtaagtcttgccgagatacagccagcgcttgcacagactgcgaccgtccgacgtgaagaaatggactttgcgagcagcgccgggttgcgcccagccgcttggtgccggcttcctgctcataccatcaccatgtcgatttcgtcggcgaagaagttaaagccaactccatctgcgtagccagtgtaacgcagccgaatagtaccatcgatgtgggcttcttcgacgccgatgacttccaggatggtttcgtcgcagtgcagcttgacgaacatcttgatgccggagccaatcgccgcgaaggcgatctgcttgtacaggtcttgcttgatcattggtggcgctcccgtttgctggtgtagatggcttcgacttcggcctcaagcttcgcccaaagttcgttgtctaccggaccccatgggccggtctgggcgccgtcaaccggcgcgaacttcccaccggcgcgacgatattttgaaagggtctggagttcgatgattcgtcgttcgtaggtgtcgaattgggcggtcatttgacgtactccccgaaataggaggtgtggagtatttccaggcctttggagatagccttcagcttgatgccgaaattcttgatcgcccagtccagatcgtggtgatagaactcgatgatgttgacgatttgaccggcgctgtagtggatgacgcgaatcttgccattccagcggaaatcttcgcggctgtttacggcctcgactgcgatggtgtcgtttctgccgatgttccatttggagctagtcatgtcgcaatcctctttttggagtgtttcgcattcgatgaggtaactatacctcagccacctcatcgagtaaagcattttcttcagattatctgaaaccttttgaagacaggaattgccgccagagccagtcggtgtgttcgttgcagtaacgctcgccatcggacgacatagataaggcgccatcattgatgccgaagtgggccgcagcgagacattcgaactcgaactggagcgttcctgggcgagggatatgggacgtggcgtatttctgcacggtcagtgatcctcagaaggtttagcgtttgcgatagccgctactttctgcataccgaggcgatagaaatcggcttctttcctggcttttgtaagctgctccatggcgtcgcacgccgtcttgtgctgggcattggcgttcttgatgctgccttccaggctcttgtccagctcttcccggagcgccttctgcgatgctagctctgcctccaaatcctggattctgagctggagctggcgatttgtctcgccaacctggttttcgcgggcgatggagttctgaaggcattcgtcaaggcgagtattttcgcgcaccagctgatgcttttcgactttcgcctttctgcacgtctctcgcatttctgaaagctcaatcgcatgcagatcgtcatccgggtctttacgctcttccttcgactccatccgcaggtagtactggccggctgcgaaggcgagcactgcctggtcggcatacgctgcggcatcggtcatgtatctggatttgtagcgaggcagaaacttgcactcctctggatcccagaggagactatcggcaataggccagaatttgcggaagccatcaggatcgacttctacattgaccatttgcagctggccggcctccacttcgacttccagaggaacctgaatggcgccggtgatgtactggaagtacactatgctagacataacacaatcctcataagaagtcgcggccgggaccatcccagccgcatcgtaatcactcttcgccttcgtccgcgctcagccactcttcgaaggcgaaatttaccttagactcgacccaatcttgaagctcatcggcgaactcgtcactgtcgatgtccatcggaatgcccagagtctcttcgttccacagttcggcattcagttcgaactggatagccggttcgccatccacattcagcagggtgcggtctgcgacttcatattcgtcgacatcgaagaggaaaccgccgctgatgatgtgctggatgaaagcttcgtcgaagttgctgacgccgatattgatctgcttagtcattttttctggccccttatttggcgagtttgtactgagctttgagggtggtcagcttagctttcagggcgatcatagcctggccgcgcaggccttccatttctgcctcgctgatggcgatcttggcggagcggatttgatcgttgatctgggatttggtcatttctgcgttcctctgttttggagtgtttcgcgttcgatgaagagattatgacgctattcagaatggaagtaaagcagaattgtgaaatatttctcaaagtggacgaacggtatgccccgtcaggaatatttcctcccatggaaggcatttccgcatccgaatgttgattaggtatcccaaagcgcgcagtggcgaatgtgagtccgcacgtacatagggttgtattgtgcgaagtgctcgacggtcgcatccaaggctctgctattgccgcacccttccgctttgcgagccaggaagaatgcttctatttgctggtttgcgttcatcgtcttaccctccaggtgtttgttcgtttcgatgaagagattatgccgttggtcagaatggaagtaaagtgtattaacaataaaattatgttcaccgacgaacggttgtgctcgaccgtccgttgcggcgtcgatatactcgacctattgctgacaccggattgattaga

SEQ ID NO: 7 - DNA, 65814 bp, unidentified
  source 1..65814: mol_type = genomic DNA; note = EPa8
atgtacaaactcaaccctgcactgcgagcggtctggcgaactcgcgcccgttacaaagtcatttatggcggccgggcgtcttcgaagtcacacgacgcaggcggtatcgccgttttcctcgcggccaactacaagctaaagttcctctgtgctcgccagtttcagaaccgcatcagcgaatcggtctacacgttgatcaaggacaagatcgaaaactcagagtataatggcgaattcatcttcaccaagaactctatcaagcacaagagtaccgggtcagagttcctattctatgggatcgcccgtaacctgtcggaaatcaagtccaccgaaggcatcgacattctctggcttgaggaagctcactatctgacccaggagcaatgggaagtcatcgagccgaccatccggaaagagaactcagaaatctggatcatcttcaacccgaacgaagtgaccgacttcgtgtatcagaacttcgtggtcaagccaccgaaagattcctgcgtcaagatgatcaactggaatgaaaatccgttcctcagtgagacgatgctcaaagtcattcacgaagcatatgagcgcgaccgggagcaggccgagcacatttatggcgggattccgaagactggtggcgacaaatccgtcatcaatctcaagttcattcttgcggccatcgacgcccacaagaaactcggctgggagccggccggatcgaagcgcatcggcttcgacgttgcggacgacggcgaggatgcgaacgcaactacgctcatgcacggcaacgtcattatggaagtggacgaatgggacggcctggaagatgaactgctcaagtcgtccagccgcgtttacaacctggcgaagatgaaaggcgcctcggtcacttatgactccatcggtgtcggcgctcacgtcggatcgaagttcgccgagttgaacgatgccagtcccgacttcaaactgatctatgatccattcaacgcgggcggcgctgtcgataagcctgatgatatctacatgaagctgccgcacacgacgatcaagaacaaagaccacttcagcaacatcaaggcgcagaagtgggaagaagtcgcgacccgattccggaagacttatgaagcggttgagcatggaaaggtttatcccttcgacgaattgatttcgatcaactctgaaacgattcacccggacaaactaaatcaactgtgtatcgaactttcgtcgccgcgcaaagacctggacatgaacggccggttcaaagtcgagtctaagaaggatatgcgcgagaaacgcaagatcaagtcgccgaacatcgctgactcggtgattatgtcggccattctgccgatccggaagcccaaaggtttcttcgacttctaaacacagaaaagcccggatcgctccgggcttcgggtcttactcggtgtggttcctggcgctgagtgtcgacgcaacggcctcgccgactcccagggcttcctggccggccgcgagcgcttcggcttccgactcgacgatgaagtcatcaccttggccgtcgcctggcggaacctcgaccagcacggcttcttcgccttcgaaccgcaggtcataagtcttttcgacggacagtccgtaacgggcattgagcgcatcccagagctgagcttcatagttgcgcaggtcttgcagagatttctggtggctgagcatcgccatatcgacggcccgttgcagggtttcgtccaggacgttgaatcgcatgcgaagagaacgaatccgctcgaccacttccgcatccactacatgtctttcgatcatcgcttttcacctttgctgaatgttacgttgtagccattgtcggccaggtaggtcagggcgccttcgaaggaagttccgacaagatgcttgagctgcatttcgcgttgcgcggcgatccagaatgccgttccggagaactctgcgcggccttccgacaataccttgccatcaggcccgtcgatccgaacgtgaacggaagatagcttcagtaccatcaatgaatccctccactggcttgcgacggcatgctttcagcgcgagcggcttcacagtccgggcagggacaggcttggcggacgcgctccaactcgtcggcatccatgacatagagcttcccatcggaagtgtcgtgcgccatggcgatgttcgggaagtcggcagcgctcaggccggcgacagcgcggatttcgtcccagagcgccacatgctcggcattcaggcgagctgcgagcgcttcgtgctctttcgctacacgagccatgaactcgtccatccggaatgcgaattccgcatcgatggatcgggccgaggccatggagttgaggcgaatcggttctttcttcatggtaattctcttttggctgggggtttgtggtctcccaggcctattcaaagcctgggtagcatgatgctgaagatgaacaagaaggctgcaaacgccaatagcgttcctgtgagtattttggttcggctctgcagctcagcgtactccttggttgacagcccttgctgcgccgcctcggccgcgaaacgagctttcgcctcgataacttccgagcgcagcgacaggacatattctaaggcctcttcccgcgctttttcggcctcgaccgacctagggtcgcgggccgagacttcgctgtgccctggcctcgcgggatgggcctgcagcgatggaggaagttcggcggccacgactccatagtcggcgcaggcccaagcgatcccgatgaggatcgcgaggatggactggacgattcgcagcatcactttgtcgctaggaagacccatggttaatcctccaccgaccgaacgatttccatattgcgtccggcattggttccggcagcgtaggcgcgccgaccgtcactgtcttccagacgcatgagtttggtaacattcgacttcttgtaacccggatcgccgaaatgttcgtggaccgcagcttccttaaccaccaccagagacgttccggccgaagaaaccagttccatacgtttccgggtgattgatctgaggcgatagctgatttcctgggtcgcggccagtttgaattgcgcggcaacctttacgttgaaacgttcgtacccttgagccttctgatactcccgacacagacgatcaatggcctcgaccagggagttgaacatgttcaccgccagctcaacgtccgacttgtagcctttgaagcgtacggcatgaccccagcgcttggtagtgcttccgtcgcgggcactcctggatgccttagccgatgctctgtggttgttgatgccaccggcgaaatccatgatgcagtcattgtacgtcgccacggccactgagaaaaacttcatccagttcgggattgcggaatagtaacgagtggcaatttgctcatcgaactcttcgcgaatctcgccggtagcttcgaagtcgtgaaggtcatatttgtccttcaacttcttcacacgctcggctgcgatggccgcttcgtgcggactggaagagtcggctgccatggcggtcagtttgcggatgcggtctttcgccttctcgatggcttccggggtgaattcgttctggtcggtcatggtcggttccttttgtctgaagggtttcgcttttcaatggagctattctgccttcattcagaatggaagtaaagcactttcttccactatttcggcatcgactggaagaaattccagatccaatcacctgctaccagcaagaggatgagggcggcaaagaacaagacagcggccgcgagctgtgcgccaggcttcagtttgggatggctgagcttgggctctacgggaacggccggagcgctagcgctgcaaccggcgtctcctgggccgtagccgatgccgcgttcacacgcctggagcgacaccagggatttaagatactcggtctgcttttgcgactcttcgtagatgccggcgacggcgaaccagagggcgaacactacggacgtacacacaacccaggcgccggtcagcaggagggccagcgggccgatgacgaagacggtagcagccaggacgattgcgccgccccagatgatgaagccggccagaccattagtgatgtcgacacagaactttttcattttcagattccttcggttacgggatggaggggatttgaaactctgcgccgccgagaacatcaatgacgacttcccagagcgtcggaacagaccactggtaacggtcgaagtcggtttcaggatcgacgcccagcgtcacataggaagtggcaggccatttatgaacactgcctttccgcatgagagtcgccacgcggccgtcaccgagcggattcgtcctgtgcggaacgtacgcagacatcgaatattgctgcccggcgtcgataacaaatctttgcctctggcgcagacatacagagcccacaggattccagccgcgaccgccgcaagcctggcgagccgaagaatgctcataaccttcgtgagtcatttcgccgaggcaagccgagcgatcctcgtaatagttgatgttctccatcgatccaaccagcaccagagactcgaaatcgaatcgatgatcgtggatggccgagtgattgaagcaaagccgacgcggcagctccgggtgccaaacatggaggcgaccggccggaagttggacctgaatgaaccccaggccgtgcagagtgatcttgtccttcatcgggtcatggacggtgctcatggataatcctcagtagcagaaatgtattgtaagagttacgattgataagccggtcgcccatagaagggcgaaccaggccatggctttgatggtcgtgtagatcatccgaagaattttccggcacagatcgggccaatgcccatttcgatggatgcgtggttggtcaactcgcgaccgcagcaggagcactgaccagtcttccgaccgtaggcgactgccgattccatcggcttttcgaacatcttcagaacgtcgtcgtgctcagtatcggtgcagtcgcgactcttgatgaatttgccattggtgatccggccgaggtagatgtcgcccaggacgtacaggctaccggcgttccggctgtgagcgctagcctctttcacaacaacgatgagcggctcctcgccttcgccagctaggcggattttcgggcgcttgataccagactctttcgccttctcaaacgctttctcgatgccggaaatgtccagagtcggcgcagcagcttcctgcgcggccactttctcgcgatacttggcgaggttttcgatggcgcgcttcgcagcagcgatctgattttctgtcaaggagccgtatttatacaacgactcctgaaggctctgagcgaagctgaaggaatttccagtccaccactcgatgatgtccgggtgcgcggcttcgaaggccttaattttgaggtcgcgctcttgcgcagcgctacagattttctcgatgcgcttttctaccgccttagcacggctcttggcgcgctgctccgggctggttttatactctttgtatccgacgccgccgcaggcaaagcaggcgcgaccataagacgaagggccacggtacaggccggtgcctgcgcatttggtgcacttgtcgcgatacagcttcacttccttccgggagttcgggcgggcacccatggacacgtcttccagggtcttcggcgcttcgttgttgatctctacggtagcgaagtcatcacccaggtcttcgaagccggtgaacagattctctgctgcgttcatgtcgattctcctgtttggaaagttcgtttcgatgagttgactatacgccagaaatggaaaaacggtagcgatttctcactaccgttcgtcgggtcgaagacaatcaataaatgtcgctattgatcttgaacccatgctcagcgccgtcgttgtagtcgtactcagcatagctgtcgcagtagtcgttcaaatgctgaatgatgcctagaacgtcgttcgcggccttgtgccgtttcgcggcgatggtcttggcgatgctgtcgccgacttccagggtttcggccgtccggcgatggatcagcagacggctccaaagatagagccggacgcgacgaatgatgtctcgatggcgctccagtcgtccgtgcaactcttcaatttcttgctcgcgagatttcactactcgtcgaagctgctgaacttccagttccaaatcggccttagtagccatgttcacctcaaaaaggaaaatcgtctgggactccaggaagttcgacgattattgttgagcctgatcgatccagaatgcatccgaccgagccagccctgtggggatagggtctacacgaactataacaggtaacttccatgactattcgccaggtcgatcctccacaccatctacagactggtgggcgcttcgacttcagttttcgttcgtccaagacggcgcgtctgtcgcatgaaaggcagcgcgccttaaccgacgtaaccatgggtatagtcgatcattcggatgagaccatcatcctctgattccctcgacttcagaccgcccaaagagtccgactggccgttgcatttcgcatcgatatccatcgaagacaggaatcctgccgatactgcggtgatatcaactttgtcgccggccttcttgaagtcttcgcactcagcatcgagggccacaattgcactcgcggccatgttcacatgactgatgaggtcggggaagatcacaggaacttcacgcgacatgccacggaccgtcagcttcaggactacatacttcatactcactatcccttttgtatgtgaggaaagaacttgctgttttccggatggtgaaaacgctcggtcgcaggcggtctttcttccggacattgaatcgtcgaaggcgggaaaaccgcgccggcgataatcgccgcgaggagtgcagcggatgtcgacatccagagggcggtttccaggctcacccgaacttccggacggcgcggcttcattcgctccaccctcttcctggctcataggatggcagaccgccgccgcgaatccaattgtcccacatacggttcagaccagtcggtggctggggcggcggactgtagaatccgggagtctcagtgctgctcaggaaataaggtgtgcaaacggcctggacggccagttggtgccgctcccacatcttatcaatcgctcttagcatgacgtcttcgcactgagccttactgtcgaaccgtctgctagtatggtccggcatctggacgcagccgtctccagtgcaaaggaaagcagtagcaatccatacggtgatactcgccatttcgtcaccctctttagttgatgagcagagtctattccatctgctcgccaggagtaaagcgcttttcgtcgggataaatgccgatgatgtctgcgtcgagcatccaaatctccacggacggatcgtcgctgctgatttgatataggttgtacagctcccgtccgccgacagcacgctcgcctcgtggctcaaccgccagaaccttgccgtgtccttctccgtgctcgtccaggtatatgacgtgatcaccgacttcatagctttctttcgtgacgaggcgtgaacgcgagctgttctgcgattccaccatccaggaatctagcacgccgcctttcatgtcgcgaaacaatcttgccgatttgtcgcaatcgaatacgcccagaacttcgccgtctttcaacacgatatgtacgattggcaaaagagtattcatgtttaatctccattggttgataattagagtctaatctgccgaaaagttcccgtaaagaattattttctcataactgattagttgcaactgttaatctgatgtatatgtttgaatctcttttgaacgtttgatgtttcccctataataagcgcacacagtcaacaaccacgtggaactacaatgtttaaactttcctggatattcgggcgcaaaaaggataatgctgcctgttcggaatcggcgccggagaaagtcgcacaaatccctcaacacgatccgctcgaccccatgatcaagctgggaaggattcgcggctggaacgtcgagccggagaaaaccccggtcattcgtagtgtgaaagatttcctggagccgggcctatctgtagcgatggatagtgcgtatggtgatggaccaactccggccgcgaaggctgctgcgggcggccagaatccctatgtcgtcccgactatgttgcaggactggtacaattcccaagggtttatcggataccaagcttgcgcaatcatttcccagcactggttggtggacaaagcttgttccatgtctggggaagacgcagcacggaacggatgggaactcaaatcggacggcaggaagctatccgatgaacaaagcgcgctgatcgcccggcgcgacatggagtttcgcgtcaaagacaaccttgtcgaactcaacagattcaagaacgttttcggcgttcgtatcgcgctgttcgtcgtggagtctgacgatccggactactacgaaaagccgttcaatccggatggaatcacgcccggctcctacaagggaatctcccagatcgatccatactgggcaatgccgcagctcactgctggctcgacggcagatccgtcttccgaacatttctatgagccggatttctggattatcagcggcaaaaaatatcaccgcagccacctagtggtggttcgtggaccgcagccgccagatatcctgaagcctacatacatcttcggcggtatcccgctcacccagagaatctatgagcgcgtgtatgcagcggaacggacggcgaacgaagccccgctgcttgccatgtcgaagcgaaccagcaccatccacgttgacgtggagaaggccatcgcgaacgaagaggccttcaacgctcgcctggcgttctggatcgccaaccgtgataaccacggcgtgaaagttctgggaattgacgaaggcatggagcagttcgacacgaacctggccgacttcgacagcatcatcatgaaccaatatcagctggtcgcggccatcgccaagactccagccacgaagctcctcggcacttctccaaaaggattcaatgccactggtgagcacgaaacgatttcttatcacgaagaactggagtccattcaagagcacatattcgacccacttcttgaacgccactatttgcttctggcgaagtcggaagaaatcgatgtgcagctggaaatcgtctggaatcctgtagactccacgtccagccagcaacaagccgaattgaacaacaagaaagccgctaccgacgaaatctacatcaactctggcgttgtgtctccggatgaagttcgcgagcgtctgcgcgacgatccgcgttccggctacaaccgactcaccgacgatcaggcagaaaccgaaccgggcatgtctccggaaaacctggccgaattcgagaaggccggtgcacagtcgacaaaggcgaaaggcgaagccgagcgagccgaagcccaagcgggcgccgtagagggcgcaggcgggccagttcccgcagccccacgcgggactaagcccctcgcgaaagcggccgaggaaggggccagcgaggccgctgcaccgccgtcgcggccggaccccaaggccgagttacggaacttgctggccgatcttttgtcgaagctccaagatctggacgacattcaggcgccggacggcgtagacatagagcacaatgacgcgcctggcctgaagcgcacatcccaacctggcgtgtcgggcatggaaccttcggtgttttcgtccaaccgcatcgtcggtcctcgtgatcattcggaactccaaaggatcaaggttaatggaataaccaccttgatcgaaaatccgcgtggaagcattcggcaaggaaaggatgggagctggcgagttcagatgaaacatcactacggattcatcaagggaacgaaaggcgctgatggggatgaagtcgattgcttcgtcggtccgaatctgggctccaaacgggtcttcgtcgtcaaccaggtgaacaaggaagggcagtttgacgagcacaaatgcatgctcggcttcaacaacatcaatgacgcgaagtctggatatctgtcctgcttccgtccgggttgggatggtctcggctccatccacgaagttgacctgcccgctttccgtcgctggctggcgaacggcgacaccaccaaaccattcgggggcgagtgatggcattcaaggcctccaaaaagcgcgagcgccgggcacctcttccagttggaagagggaagcccataattccatcggcaggaatcgaggcctggtatcgaaagcagataaaggatatgtccaagctcatgatctccgactatcgaaacgagattgagaaggcgctgtcccagcctgcggccgaacggttcttcgccagagacgaatccgttaacgtcctgttcaagatgacccttcgaagcctacagcagcgatggagccgcatttttgaaggtttcgcggccaagatcgccccggagttcgtcaaccggaccgaagaagccgccactgctgcgacccttcacagcttgtcggtggccggcgtcgatcagccacgagctgcgtataatgagagcgtcaggaacaccctggaggccgcaaccacttacaatcatactctcatcaccaagatccaagaggaagtccacgagaagatttacacatcagtaatgctgtctctgacttccccgaatccggaagagcaaggaacttccggcataactaacgcacttcgcaaagtcgggaagttttctgaagatcgaatcgaactcatcgcaagagatcaaacaagcaagctttacagttctctgagcgatgagagaatggcggaaaatggagtcgaggagttcgagtggctacactcttctgccggcaagactcctcgccacacccacctggagaaagatgggaagaggttcaagctgaatgaccccagactttgggagggtccgaaagcagaccaggggccgccaggatgggcgattaactgtaggtgcagaaagataccgatcatttgatatcgataggagcgctatatgccgttagttcatggcacttccaatgaggctcgttctgaaaacatcaagcgggaaatcgaagccggtaaagacccaaagcaggctgcggccatcgcttattccatccagcgcagtgagaaagggaagacggcgaaagattgttcgcctgagctcgtcgccgatcttcgcgccctggtggacgctctgtcgaggctcgtgaaatgaaccgcaagacgtgccggcgccgactcgtggtcgatgtaatcagggccaatattcacggcggattcttcagcctgaagtttgccgccatcgatttggcaatcatcggcgtcgccatcttgatggcttttggccgataatgctgagaaaaatctggattctgactaaaaattctagtccggatagccgcaagttaccgtttacggaaaatagcagtaatttggaaatcctactgccgcgaggctttaacagagccagttcctaatttccgatttagccgcatgcttcaaaagtatatagcctgggaaattagaagtaacgttccaatagaattcatctataagtaacgttataatataacgtcaatctatatgctctagacgtattgaaattcaatttttaatcggtaaattggtaatttgaattagtttaggagttgaaagcctcgcggcagtaggcttagacaaatcccgtcaagtttccgagaccaaattaccggattttcgcgctgaggaaactggtaattagatcacaatacaaattataatgtaagttaacagtcacggctacatctaattattgttccgcttatttacccttagatgtactgcgtatataatacagccatagtccacgactcttcgaattaacgatggcaaagtcgaaaagaaaaattgacgaaaatggatatatgaccatagagggctgcccgatcagctcttatggcgttttccaatattctgctggtcaactcggtcttccgggcgatccgacgcggattgtcaacgtatatcgcccggagtctgccgtcagcgatccggagtacatcgaatctctgaagaatctcccgttgatcgacgagcatgagatgctgtcgggattcgacgatgatgacgatagcgtggcccccgaagacaaaggggtggagggcatcatcacatccaacgcttactacgaagccccatgggcacgcggcgatatccgcatctattcccgcaacatgcagaatcagctggaaaggggcaaagaagacctgtccctaggctatagttgccgctacactgagcaacccggcatctggaacgggacgccttatgaagtcgtccaggacaagatgcgcggcaaccacattgccctggtaaaagagggtcgtgtgccgggggccagagtattggatggtctgtgttttgaccatctcagttttgatttcagaccatccgatgagggtaatgaaatgagtctcaagaaagccaagcggaagccccctgtccagcgcgtagggcaagctgctgactcggcggtcgaagagttgcgcgccctgtggccgaagctatctgcgtctgtccagaagttcctgggcgaagaagagcaggagccggagcatcaggaaggcgcagctccggccgaaccgaccgacagcgagcacctgaccgagcatccgactctggaaggtgctcagaaggatgacgaagagcaggaagaggagccttccgttgtcgatccggccgtggccgccgtcgagccggagcatcaagaaagcgccgcatccgaaatgtccggtgaaggcgaagtcgccgaactgatctctcaggtcaaagccattctggctcgactggagggcgcggtagccgaaggggcagacgaagagcatggcgaaggtcaagatgtcgtcgagggcttggaggagcagagcagcctcagcggctcgcaaaccgccagcgacgatggtggtgagagcaaggataacagcgaggaacttcctgaaatggcacagaagaacgcgcaagatgctgcaattcgcggtctctatcgcgacattgctgctaaagatcgcctctacaagcgtcttagctccgtggttggtgcgttcgatcaccgagctatggactcggctgaagtcgctgtttacggcgtgaaaaagctgaacatcagctgtgcgaagggccaggaagctctggcgctcgacatgtacctgaaaggcgtcgaagcctcgcgcggcgcggccagccgtcaatcgaaagcccaggattcggccggttctgctccgcagtgcgccgagctggacagctacctgaagggggagtaactcatgttccagaaacaagtttaccgccagtacactcctggttttccgggcgatctgatcgaggacggcccgaagcgggcgcggccgggtcgaatcatgtctctgtctgccgtaaatccggctgccaccgccaccggccccaaccgcatcagtcgcgctttcggttacgccggtgacgtcagcgccctcggcgaaggtcagccgaagaccatcgcggctcgcgcttctgaagtcgtgatcggcggcgccaacttctttggtgtcctcggtcatccgaagcactatgcgctgttcggttcggccggcgactccctggctcccagctatgatctgcccgatggcgccgaaggcgagttcttcgacatggccaccggcctggtcgtcgaaattttcaacggcgccgcagccgccctggacctggactatggtgacctggtcgcctatgtccccaacaacctggctaccgccgacaacgcgcttggcctgccggccggcgccctggttggcttcaaggctggctccatgccgaccggcttggtccagattcccaacgcacgcatcgttaacgccatcagtctgccggcccagtcggcggggaatctggttgctggcgttaccatcgtccagctcacgcagtaaggaggcgtcatgagccagatcagcaagacccattcgcgcctcgcaggccgcaatgcgaaacctttcgacctgaagaacatcaccaatgatgccgtggcatctctgcgccgcatcggcctggtattcgatcacgccgtcgtccaggaccagatcaaggccttggcgaaggccggcgcgttccgctccggctcggccatggacagcaacttcaccgccccggtgaccacgccgtccatcccgactcccatccagttcctgcagacctggttgccaggcttcgtgaaggtcatgaccgctgcacggaagatcgacgaaatcatcggcatcgataccgttggctcctgggaagatcaagaaatcgtccagggcatcgtggagccggccggcactgcggtggaatacggcgaccataccaacatcccgctgaccagctggaacgccaacttcgaacgccgcaccatcgttcgtggcgagctgggtatgatggtgggtaccctggaagagggtcgcgcctcggccatccgtctgaacagcgccgaaaccaagcgccaacaggcggccatcggtctggaaatcttccgcaacgccatcggtttctacggctggcagagcggcctgggcaaccgcacctatggtttcctgaacgatcccaacctgccggcattccagaccccgccgagccagggctggtccactgccgactgggcaggcatcatcggcgacatccgcgaggccgttcgccagctgcgtattcagagccaagatcagatcgatccgaaggcggaaaagatcaccctggccctggccaccagcaaggtggactacctgtcggtaaccacgccttacggcatttcggtttcggactggatcgaacagacctatccgaaaatgcggatcgtgtcggctccggaattgtccggcgtccagatgaaaaaccaagagccggaagatgctctggtgctcttcgtcgaagacgtgaacgcggctgtcgatggcagcaccgatggcggcagcgtgttcagccagctggtacagagcaagttcatcaccctgggtgtcgaaaagcgggcgaagtcgtacgtggaagacttctccaacggcaccgccggtgcgctgtgcaagcgtccgtgggctgtggtgcgctacctcggcatctaacagatgcctattcaccaaaggccgggcttccggcctttgttcactctgactctaactcggttgtaggggccggttagggcataattactaggactacgcccatgactgtttatatcgtttcctccatgactcaatcggtgtcttacaatgcgtatgacacctctgatccgtccaatcctcgcctccagcgaaagattctgattcgcggccgcgcaggcatcgcatccgaaacttccggcttcggcgacatgatttccgacgaggccggacgtccgatctggaccccacagggcgattgtactgccgtgagcgattcggatttcgagctgcttcaggccaataagattttcatgcgtcacatggagaagggttatctgcgagtcgtgaagaccgacatcaccagtgaccaccagcggatttccaaagagactcgcaccatggagcgcgatggattccagcctctggatgctactcgcctgcagcagaaaatcaaggtgaccacagccagcgcttcccaggaacaagagttccggatttaaccgagggtttcggtatggtgattttcgacgaacataagtttcgcacgctgtttccggagtttgctgatccagccgcttatccggacgtgcgcctgcagatgtacttcgacattgcgtgcgaattcatttctgatcgcgattcgccataccggattctcaatggtaaagccctggaagcctgtctgtatcttctgaccgcccacctcctgtcgctgtccacgatgcaagttcagggcgcggctggaggtggcgtcactgccggtgggacccagggcggtttcatcaccagcgctactgtcggcgaggtcagcgtggccaagctcgcgcccccggccaagaatggttggcagtggtggctttccgggacgccttatggtcaagagttgtgggcgctcctcagcgtcaaagcggtgggcggattctacatcggcggtcttccagagcgccgaggcttccggaaggttggagggacgttctggtgatccctggtgcgaatcttctgcgaatggccttcggggtcatcggtactcaaattgtgaaatatcgcaagtttgagcagcgagtgaagaatgatcaagctcagtacgtttccatgttcgaggagcctttcgacctggcagcgtctgttcagcgagtccgacgcgatcagtatgtccagtttaatctggagttccaacggaattacgttatgatcttcgccaactttgagatggttgacttggatcgcgatgtggccggtgaccagttcctctggaccggaagagtctttcagctggagtctcaaggctcctggttttatcaggacggctggggagtttgcctggccgtggatatcggtgcggccaagctcactgatgacgggaaaccgactttctaggtgatgtatgtttgacggcgaactgatagcgaaactggttgtcgagttgaatgcggcgatgacatctgctcaagaggctttgcagttcccggattttgaagtcgtccagaaagctcagccgacccaacagggaacgccaaccaggccgaccatctttttccagaaactgtttgacattcctcgcggctggcctgccaccgattggcacctggacaacacggcccgcaaatatgtagaaataactcgacagcatgtagagacgactttccagatcagttcccttcattggcagaatcctgaaataactcacgtggttacggcttctgatatcgccaactatgtgagggcttatttccaagctcgatccacgattgagcgcgtaaaggaactggacttcctcattcttcgcgtgtctcaaatttccaacgaagcattcgagaacgacaatcaccagttcgaattccacccaagttttgacatggttgtaacttacaaccaatatattcgcctgtacgaaaacgcagcatattcggccgatggggtattaataggcatatgagtctgaggcgcgattcagagctaatcgccgcgcacctccagatgttaagagccatgcgcggcaggtccgtttcagccggatggtattccacggctcgatatcctgacaaggcaggcggatcggtcggaatacaagtcgcgagaatcgcacgtctcaatgagtacggcggaactatcgaccatccgggcgggaccaggtatattagggacgccattgttcggggccggtttgttggcgttcggttcgtcagaaacgactttccgggagaaaccgaggtaactaagcctcacagaattaccatcccggctagaccgtttatgcgatatgcttggaatctgttttccgcagatcgcgccgcaatccagaaccggatagccatgaggttggccagaggacagatcactccagatcaagctcttgcccagatcggcctggcattggaaggatacatagccagaagcatcaggaccgggccatgggtggctaactcagcatctacggtcaggagaaagggattcaacagaccgctggtcgatacggcgcacatgcttcaatcgattagcagcagagtaacataaccaggagatcatccagtgatcagtcagagccgttatatccggatcatttcgggcgtaggcgcaggcgctccggtcgcaggccgaaagctgattctgcgcgtcatgactaccaacaacgtcatcccgcccggaatcgtcatcgagttcgacaacgccaacgcagtcatgtcatacttcggcgcgcagtcggaagagtatcagcgggctgcggcttatttcaaattcatcagtaaaagcgtgaattcgccgtccagcatcagcttcgctcgctgggtaaacaccgccatcgcgccgatggttgttggtgacaatctgccgaagaccatcgccgatttcgccggcttctcagcaggggttctgaccatcatggtcggcgcggccgaacagaacatcaccgccatcgatacgtccgcagcgacttctatggacaacgtggcgtcgatcatccagaccgaaatccgcaagaacgccgacccgcagctggcccaggctaccgttacctggaatcagaacaccaaccagttcaccttggtcggcgccaccatcggcaccggcgtcctggctgtggcgaaatctgccgatccccaggacatgtccactgccctcggctggtccacctccaacgtcgtcaacgtcgccggccaggctgccgatcttcccgacgcggccgttgccaagagcaccaatgtcagcaacaacttcggttcgttcctgttcgccggtgcgccgctcgacaatgaccagatcaaggccgtgtcggcctggaacgcggctcagaacaaccagttcatctacacggtcgcaacttccctggcgaacctcggcactcttttcaccttggtgaatggcaacgccgggaccgccctgaacgtgctgtcggcgactgctgccaacgacttcgtggagcagtgccccagcgagattctggccgccaccaactacgatgagccgggcgcttcgcaaaactacatgtactaccaattccctggccgcaacatcaccgtttccgacgataccgttgcgaacaccgtcgacaagagccggggcaactacatcggcgtcacccaggccaatggccagcagctcgcgttctaccagcgcggcattctgtgcggcggtccgaccgatgctgtggacatgaacgtctatgccaacgaaatctggctgaagtcggctatcgctcaagcgctcctggacttgttcctgaacgtcaatgcggttccggcgagcagcactggcgaggcgatgaccctggcggtgctgcagccggttctggacaaggcgaccgccaacggcacgttcacctacggcaaggaaatcagcgccgtccagcagcagtacatcacccaagtcaccggtgatcgccgcgcctggcgtcaagtccaaaccctgggttactggatcaacatcaccttctccagctataccaacagcaacacaggcttgaccgagtggaaggccaactacacgctgatctattcgaagggcgatgccatccgcttcgtcgaaggatcggatgtgatgatctaatggtttgcggcggactcgatccgccgcgaccttccataaatggagtgaggaataagcaatgatcaacatttctgcgttcggctcgatctgccagttcacggcaagcagaactttcccgaacggattcaccgtcaccgagtttgccgacgatgcggaccccatcgacagcccgccgttcactgcggccgataccggcgtcggcctcaacggtgacatggtagtctggaaccgggcgaacatcctggaagtcgtcgttaacgtcattccgaataccgagggcgagcgcaacctggcagtcctgctggatgccaaccgcaccggaaaggacaagtcgggcgctcgtgatgtcgtcggcctggtcgtggcgatgccggacggcagcaaaatcacctgcaccaacggcaccccaatcgacggcgttctgatcaacgcggtggcaagcgtcggccgtctgaagaccaagccgtatcggttccgatttgaaaaagtgatcaaagccggtactagctgatgaagaaaattccgctgacagcagtccccaatcaagcgatctcatttaacgccggtagcagctattggaagattcgcctgtaccagaacatggacatgatgaatgccgatatcagccgcgacggcgtgatcgtttgccatggggttcgctgcttcggcgggattcctcttctccagtacagccatcagtaccgacctgactatggcaatttcgtcttcgaccgcgacgccgattggacattgttcggcgacggcatcaacctgttctatctggacggcgccgaattcgccgagtatcaggcgcttgccacgaggaaagaatgagcacatcaacgatcagaaccgggacgaacaacgatatccttttggacgacaatggaaacatggttatcctcagggatgtcgaagcgtgcgcccaggacgttcgggcggcgatgctcatgcgcaccggcgaaaacattttcgatgtgaactccggcgtgggatatttcgaatacatcttctcgccgcagaaaagctatgatgacgctcgcaaatccatcgcggatgcaattttatcctcgccggatgtgaccggcatcgagcagcttgacatcgacataaccggggaagtcttcggcgtcgatgcgaaagtcatcaccatccacgggcctgttaccacaggagtttgaaatgagtaccatccgcatccaatacgccaacggcacccaactgttcctggacggcaaaaatccgccgcccctggacccgctgccctcgtttaacccgtctgtcgaagatctggaaggcctggaccgcgaaaagaacatcgacaagggcgactcctcgccggccggtcttcccgttcccccggtaaacgtcgattccaatgtcgacaacggcggaaccatcccggctccggtatcgaccgacgctgctgcggccgaatcggccccggaaggcgcccaggaagctcctgcagcgggccaaggcgacgagaaaggcgccgaggaagccccgactacagccccggtagaaaaggccgaggaaacggcctcgccggccgctgaagaggaagccccggctcccgccaaggccacctctcgcaaaaccaccagcaagtaaggactcgacatgatcaacgtcagcggcttcggcacaggaattgtaatagtttccgcctcatcgttcccgatggggttttccttgtcgaagttcgctgatgatgagagtccgatatcctccaaagagctggagccgttcggatatgagatgctttatgacggcggcctattcgcctttgacaaggctgctcctctggaagtatctgtatccgtcatcgcagggagcgaggatgatattaaccttcgcatccttctcaattccaaaaagggatcattcagatttcttccgggcagcatcccggatatgacgactctcgtggccactcttcctgatggcggccgcaccgttctgtccaatgggactatcatcaagggtccggccatcgacaccatacagaacaccggacgacgcaaaggcaacacgtacacttttgttttcggtagctaccttggcgcccagactgcgcgtcaagccatttctaacgttatccaatcggtactggaggtggtctgatgttggggattttcaccagcctcctaagttcgcgatctttttcgattgtggaccaaaacacaaaccagctagttgctgcggatttgaggataagccgggtcaacacccggttttcttctgtagggcaacgccacatgctggaagatggtacgaccaagatggattccagaacgatccaccctatggaaatcatcgtcgaagtattttgcccttcaattgatgtcgtcgatcagatcaatcaattgctcctggatcgcgacacgctgtacaaagtcatcactcgcggcatggtattcgaacggatgatgtgtaccagcgaagcgctcaatcagactccggatatgatatcggcgactcctgcgcggctgacattctcccaagttctcgtccagaatcccaagcctataatgttcagaaatgcaggggactcttctatgatcgaccgagggctggccctagctgaagacgtggttggctcggccggcgatctgttcgactacgcagtaaacggcgtccagaacgccgcagacttgttctgaggtgccaattgaactctttcctcaagtctattctcaacacgcctactctcaccatacgcgatgatgtcaccaaacttcctgtctggaagagtcttcaagtcaagaaagtggaaatttactcgccggcttccgtagtgtcgaaacctctggcgacgaaagaccagacggaagctcaagtgtacaccgaagctctggacattgatgtgaagaatggaaagatcatccaaccggtgcgactccgcatcaatgctatctgtccggacctgtccaccgttgaaagtatcatgaacgctttcaatgataacacctcgactttcgctatcacttctaagtcgatattggccgataaaatggccatcatgacgctcgatgtagatcagtctccagacatgttgaacgcggctgagatcaatatggaattcgagcaggttgagcctccagtattgaatgaattcgatcctgcgttccctcaagatagtccgacttatggggtgcagattcaatctctttctgatgctaatttgctggatttgggcgccatcggcgattcgatatcttcggccgcaaaatcgctatataatcgcgtgaccagctacttctgaggatgtatcatgcttgaaatcaatcttcccgatggccgtcaaactcgcgtacaaatcgaggcgtggtcagcattggatggctgggacctccagcgccgtttcgtcgaatttgctgtcagccaagattccgacttccgccgctctttcaccatggaaatcctgggctatgcgaaagtgctgcttggcgacgatgacaccggcattccgctgaccaccgcggcagtcatcaacaaccacctcggccactggaagaacgtggaactggttttcaactctgttctcaagcacaatggcatcgacccggccacgcacgccgaccggccggactattgggaacaagtcggatcgcagatggccatcgcatttctggccgaggcgtccaagctcattggtccagcaatgaagatcgccgaaggactcgccaacaagccggagtgattcatgtctagtgatttggatgaattcatacttcggtatgaggccgatactgccagagccgagcgcaatctggagcgcctccagaaccagatcaggcgcgtgaacagcgcatcgacgagtggccttcaggatttgcgccacttcgcagacggcgcggccactgaactcggccgagtcgttccgcagatcgattctgtgacgagcgcgattcgcgggatgaacgcgcaactggcgataggcgccactggcgtggccctggtcgcggccggcgtcaaggcgttcatgaacaccagggaccagtacaatcagcagcgcatccaggcgatggacatcggcatcgccccggcacgcttggaagagtaccagagaaaattcgttcgccagtccggtggaaccatcagccgcgagcagggcgcggagatgaccaaaaatctggcagacactttccggcgtgcttatcgcgatatcgggcgagtcggcccggaagcgcgaattctgcgtatggccggcgttgatgtcgggagcttccaaaagggcatgcggccgctcaacgacatcattactgatctggccacgaaaatggccaagctgaagccggacgaaatttctgcctacgctgatgcccttggcgtctcgcgagactacctgagcaccctggctaagatcggcccagccatgggaaaagtcaccgagatgacgactgcggaactccagtccagggtccagggcgagtccaacattcagaaattcaacgatgctctggcgaatctcaaccagacgttcaccaccctggaaaaccgagtcggcgaaaagctcgcgcctgcgttcaccaagctgatcgaaatcatcgacaagatagtccaggctattcccaatgaagtggaagaattcgccaaggacaccaaagcccgctgggatgacggcatcaccggaaaggctacggttggtggtgatatcctttcccttctcagccctggcgccctgctaggccgcctggcctcctggggaactcggcgtgggatggaagaggcaggcctgatcgacaagtcgaaggttcccggcgctcaaaccagcgaagacctggccaagaaacaagaagaccaggacaaggctactaagtccatgaaagagctagagaagctggctgaccagaccacgaagtctaccaatgattttgcggtggcgatcaacatgttcagtggcgcggtatcgtcgttcgcgaatgccgttgacgagcgccaagcttgggcagcctgggcgggggaaattggtcgggcggtcggtatgggaagcaccgcgccgacttcgcgggcaaccggcgtctatccgcacgcgatctatgatcagtcgaagagtggcgcggccggacaagtcttcggcgagccaatcggcgcccagtctcttcgcaatcgcatgttctcgccgcagcgcaaggcagagccggtcaccgttccatcgtacatcaacgatatcatcaaagatgcttcgaagatgtacaacattcctgagctggacatcaagaaactcatatacaccgaaagccgattcaacgccagggccaccagcgaagccggagcgaaaggcctcatgcaactgatgccggaaatcgccaaggcgtatggtatcactgacgtatatgaccctcgccagaacatcctcggcggaacgcgcctactgcgtgaaaacctagatcgagcaaatggcgacatgcggttggccttgacctactatcatggcggactcgatccgaagaactggggcccaaggactcgcgcatatccgggtttggtaatgagcgctccaatcgagctgatggaagaggctcagcgcaagcagaaggctgcggccatgaccgtcgccaacgagacgttcgccccggaaggcggcgacatggacattcgtccctatgatggcgggcgactggaaaccccagaccagggcaagaaggaagatgagcgccgcgaagcccgtcgatatgacgacagggttgtgcgaccggaaattcgcatcatcgaccgcatgccagaccgcagcgacggcgaaatcctcaagatgtctagacgtcaagaggccgaccgggcagattctggattccggaagttcccgaatcaagttcgcggcgagaccaagcagaacatccaggctcaactcactgcaggagccatcgcgcaagtgatcggcgttaaccccaaccagatcatgcgccgcgaaatcagccgttctgacttgctgttcggatacaaccaagccatcctgggcaagcaacaggagatcaaggccgccgcgaccgaagccaacaacgtattcctgtctccagccaagcttgccgaagccacggccaaggtgaacgccgcatcgcgagaaatggatattctcaggacgtacggcgagcaacttctgaagagcgctccagagcgcggccaggagctgaccatcggtcgaatcgatatgttggtcaacgttaccggcgcgaattctccggaagaggctcgcgagatattcagcaagcagactgcagaccagctgactacggcaatccaagatgcccaaaacgattccgcaactaagatactctactgatgaaaaagagaattctgcgagtaacattcaacatgccttatggacccgaagtcatccgagaggatttggatgttcgggtccggatcatgaaggctgcgttgcggattcagaaccgggcgactatggaaattttcggcctaaccactcagctgcgtgagtctcttctgtcacagttcaccgcgtggaagcaccggcaacgtcaagtcggcagggaagacgaattgatgatcaaagtgtcggtggaagccggctactctgaccaggggcgcgagcaagtttccagagtctttgtcggcgaagtggccattgtcgatatcatttcgccgccaccggacattggaatccgcatccagtgctacaccaggcaaatcgacaggacgaagaccattcgaaatatgccgcccgccaacacgacgttcgtcaagttcgtcgagtggggcgcgaacgaaatgggattgaacttcatctgcgataccagttacaacgatcaagttctgaagaatccgggccggtctatcactgtcgcgtcggcaatcctggcgtcgattcaggatatgtacatgccggacgtggccgcgttcgttgatgatgacatcttgatcgtgaaggatcgcgataaagtcattcgccctgatgaggtgaccaacgtcaattcgttcgttggaattccatcttggtctgaatggggcgttgaattccagtgtctgtttgagccatcgattcgcgtggctggaggcgtggcggtcgaatcgctcatgaacccgagcgtcaatggcaactatgtaatcactgctctggaatacgatttggccagtcgggatcggccgttctatatcaaagtcatggggagcccagcagcataatggccagggaaatcaaaccgttcaacatgttcggcgttcactatacttcgcggcaattctctgctgtcgatgggctcagcatgatgtcggaaattcagagtgtgccgccagaagaactgctcaagggaaccagtgtattggcgcatccggaagatcatccggaaggcatctggcttcccttgaccgctgcgaacatcaatctttatgtagttgatcgggcgaaagtaatagctcccgtacaagttcttgcacttctgtccgaagtggtaattgactggaactttggtttcctcaaagactggaccggagtcaagattccatccagatttgtcgaagatatcaaaagcgtgaagacggcacattcgccttctgtagttgcgagtttggtagcgaacggctcagcctctatgcgcgagttggaagagtattattcgactcaagatgcatttaagatgatagacatcatgacggcgaagagcgtgaacgaggccttggcgtcagaggcatcgcacaacagaatcaaaaagggataattcctaaccgggcctgggaaggctatactagacctgccaaatcagaggctttcccatgtccaatatttctctaacatcagcaaaagctcccgacagaacgcgactgatcgccgctcttgacgctcggtcgcgacgggatgctctagatttcgaagtaatgataccggctcaggttgttcaatatgaccggaccgagaatatcgcgacgattcaacctctcatcacctgggttgacacggaacacaatgccgtccaaaggcaccagctggtggatattcctgtaatttccatgggggctggcggcttccacataagtttcccgattcagcaaggtgacataggctggatttatgcggccgaccgcgacacgtctcagttcctggagtcgttgtcaatgtcgaagccgaacaccggccgcatccataagttcgagcacggcctgttcatcccggacgtattccgtcgatacaccatcaattccgaagattcggccgctatggtcatacaatcgacttctggagcgaccagaatttcgattcgcggcgataacatcaagataactgcgccgtcgaacgttactgtggatactccgcaggcgaacttcaccggcaatgtgactatcgctaacaccctggtcgtaaacggcatcaacgtgaacaaccacggccacctcgaaaacaacccgcctgatgcccggacgaaaggcggcatggttgcttaaggagattttcatggcaagttttgatttttctgatttaacagcgggggggggttgtaatggctaactacaactacatcgtcgatactggtgtgatagtcgcagataccgccgacgttctgagcgacgttgaggccgagttccgcgccgccctcggtgccaatatcaacttggccgcgagcactccgcagggatcgcttgtcgcggccgaggccatcgcccgttccagtgtcatgcggaatgaagcgcgaattgccaataccataaacccgaacgtttcattcggaacgttcctggacgcgatctgtgccttgatggggatcgagcgcggttctgatctgtcaaccttcggctatggagttcaagtcaccggccgcagccaaacccgcatttccaccgggtctagggtccagactccggccggcgcgatcttcacagtgatgagcgatgtcacgatccctgctggtggtgtcgcgaccatcgatatcaaatcgcaggagtatggcaacattcctctgccggtcgggaatctcatcatcatcgacggaacaattggatggtccggagcaaaagtcatcgcctccactcgcgtcgatccgggcagccgccaaatgagcgatgcagagttgaagaatgcccgcgttaatcgattggccatccaaggccgcaactcgactatggccatcaaggcgtatgtgagcgccgttccaaacgtcacgtcggtgaacgtaatcgagaacaacaccggcgccgttcaagtggtgaatggagtctcgtttacccttccgtatgctgtttgggtctgcgtcgccggaaacccggataaacaagcagtcgccgatgcgttgtgggccgcccataacggcggaactccatgggactatggtgcgacgaacaacggcgtcccggtggacggtccgaatggcgttcctgtgcgcgatccggcgtccggtcgaaagtatgtcgtgaagtggaccactccaattatgtacgatggatatgttaacgtaacagtccagcaaggttcctcctctgtagctccggaagccattcagaacgcagtggtcaattacgcccaggggaaagtggaaggggaagaggggctggtggtgggcgcgagcctgtcggcattcgaagtcgccggcgccatcgctcgcgaaattcccggcatctacatcaaactctgccaggtcgcgtgcgtcgcggctggctcgccggctccggctccgggcgatttcacttcggaatacgtcatgagcgcattcggccaggctaccatttccgttggtaacgttcgggtgactttcgtatgactctgcctgcgtacaattcggacatccaacaagctctgaaatggctccataaccaggcgcctggaatcaccggcctgatccagagaaaggcgcaatggtatgacagattcagccgccaattctgggccaactgggagcgcgacgttttccaattgaaaactgccaacccgttcggccttatggtttggtgcatcatcctcggcacgccttcgaaagggttcggcctttatccaaaaaacagttcttgggcattcggtcggctacgccagaacttcatctatagcggtacacaagttccgccaccggcagacgcatcgcctggcggcaacttctacggtggcggcaatgccgaaattctcaacttggacgaaatcaggaaagtgcttcagctaagatatgtagcgctgatttctaacggctcgattgcatatgtcaatcgcatgcttcgttacatattcaatgatgatgagccatgggacgaggcgaccggtctgtacttctatctcatggactcaaccggcgagaatggccctgtggagaacttggcgatatatcggaaagattgggaaggtatggtgctgttgtccagttcgcccagaacgaaccacgtgctgacatcgacccctgccagcgacgccgattggccgggagtcgatccggccgcgagcggtattccggtaacggtcgaaacggcgtccgctacggccccggacggctccgctacggtgtgcaagcttactaagccggccgggagtaccgcttacgtctccgcgccgatagatgggccgctggggtccggtagcactgtaacgttctcgttcttcgcgaaagccggctccacccgtttcattgcaattcagtcggctgccgatttccccagtcgagccgatgccgttttcgacctggattccgggaacgtaatcagcgatcagatgctggacagcagcgtggtaagcgcccgaatgattcgtctggaaaatggctggtggcgttgcgttctcacgaccaagaccgtcagctcttcgttccgcgctgcttacgtcgctccggcagaaaccaacttcagctggattgattcgaattccagcgcggcgattgacgtgcttatctggggcgctcagatcgaactgggtgatactccaactggatacttggaaactaccggggcgcccgtaaccatgaccgattatgttttgcagaccgcccagaccggaacagtcaagttcacacagccccttccgaccggagtagaagcgtattggactggagactggaaaggcgggactgcagcagaaccggccagattcgcagtcgggaatgggactcaggatacgtttactctgtcagaccccgcatacatcggcctacccaccagtggggcgttcaagctagaatacagggttggtccggcgcttaatctgtcgccgcaattgatcaacctcatgaatgaccgggcagttggtattatgccgacttgcgccggttgcgatgtcaaagtcattcaggagtaatgacgtgatcacacccgacctgatccccagtccgtttgccgctcagggcgataaagacccgattccacaaacctcctccactggcttcgcaaaccttcgcgacggctatacgccggactacgaaatcagcctggcgtcgaacaacccgcaggccaaagcggtcgagcggaaaattcaaaaccaactcttcttcatcgcgacccagaacgcacaggcgtggcagcgacaaatggcaccgccgtggtttcagggcatgcctggcggctacgaacagaatgcagaagtcgtgcgcgtcggaaatgacggcataatgcggcgttatcgttccatggtgaatgccaatgcgagcgaccctctcagcagcacgacttgggaagaacaacccgcatggtcggcgatgcgctccaacatcccgatgccggccggaggcccaggcctatcttctggcggagaagtcatcacgaccggccgcaacttcaacgacctgttaaatgggacgtgggagttcttctctgattcagtggttatcgcttctcagaatgcccccgtatatccggcttccgctggtgccgctgctggcatgttggaggcgaaatcttgggtgtccggagccaatacgttctgcgtccaacgctacactgatcgcgtcgggaacgtcgctgtgcgcgggcttaatgccggagcgtggaccaactggatgtatgcggtaaacgtcatggcccttcaacaaggtcgggtcacctatggagtcgcggccggatcggcgaacgcttacacgttgacgctagttccgcagctccaaggcggcctggtggatggcatgattcttcgggtcaagttcaacaccatgaacaccggcgcctccaccatcaacgtctccggactcggcgccaaagccatcgtcggcgcggccaacttccctctcaccggcggcgaacttggccaaggactcatcgctgagcttgtattcgacgcagcaggcgaccgctggagaatcctcgcaggcgcgccacgcatccaagttggcaacgccgatcaagattaccaggcccccagctggaaacaggtgaaggattacgtcgcgtcccaaaagctgactgaagtggactgggctgacgtcgtcaacaagccgaacgtcgctatccaagacactacgccgtggttcgccaatctggagctgtctgacgctcggcctttcatcgatttccacttcaacaacaaccgcgccaaagacttcgactatcgctttatctctgaagctgatgggtcgatggcgttctactctcgccaggggtcagctggtcctacccaggatatcctgttcagcaggtcgaatgttacattcctccagccgcgactggatgttgcgaaaaacctcgcgtacatcgcgaactctggtcccctttggcagaacaccaccgccgatcagcccggctggaagttcactttcgcacaaggtgtggacgccaacaacaacgcggttatcgcagtcaataccaccaatccggacggctcctatcgctcacagatcatgcgatgggactgggcgtccacgaacgtcatattcaacaatcgtccgctctttgccggtcaatacactccttgggattctggaaactttgatccctccaccaagttgactgtgaatgccacgaaccaaatcgccggcccgaccgggattcggaatacaaacggcaacaccggcaacatgaacacatggggctccagttccacgacggcttcatacggaaacgctgctcttcaaatcttcgggaaaggtggtggcgagcctgccgcgctttatttcgacaactcccagacaggatggtatctggggatggacaaggatggacagctcaagcgggccggctggtcgctcggcaataacgcctacgtgattaccgacgaatccaacattcgtttccacgtgaattccatggctggcactcctgtttggggcggaaacgaattctgggggccgtggaactttaatccgaacaccaagctgaccatcaaagccggcacccaggaaactagcagcactgcgatattcagcggaactatgccattcgctccaatcgcatcgctgtccgattattctcaggcccctttgacggtttacaacgcgccaaccggtccgtctgcaaaaccggccgtcatcgcgttcattcgtcctggcaactggggcgcgttcttcggcatcgataccgacaacaagctgaaatggggcggcggatcgctcggcaacagttccagggaaatcgccgattccagcaacatcatgaatctttgggcggccaacccgaccgcgccgtcctggaacggccaaaccgtttggcgatccggaaactttgatccggcgacgaaagtggatttgaacgccgcgaacgccaccaacggcaacatgatcttcaaccgcatttctggaactggtagcggcatagcttcgtcaggtcgagttggcgccatcaacctgcagaatggggcgcattcggggcaagcggcagcagtcactttcgagcggggcggcagtatcttcgtcaacttcggcttggataccgacaacgttctcaaagtaggtggcggaaacctgggggcaaatgcctatccggtcatccacgccgggaactacaataactacatcaaccaggcgctggttcaggtgggtcttggcggagtcggttcctatggcatctttgcggttctggacaatgccgctccaaccgcgaccgttcaaccgggagtggttgtggacggttccattctcatctactcgtcttgcgccgcaaactacaatagcggccaaaggcctgccggaacttggcgctgcatgggatatgtagtcaaccgggatgccaacactcctgactccgcgacccttttccagcgagtgacgtaaaatgaaatggacgcggatcagaaaccctcgttggctggatgaaacaaacatccacgccatggtgactttcgaggggatcggggaagttcctttcactgccaatccgcacgacgtggaggcccacggaagggccatccacgctgcgatcctgtccggggagcacggacctatcgccccggtagattcgacgcgggagaaggccttgcaggacgctatacgagcaagggaaaagcgggctatccttcgcgatacccgctggcccatagatcgtcacgacgagcagaggcggctgggtatcgaaaccacggacggacctgggctgatagcagctcttgtttcctggaggcagcagattcgcgattggaatagcggggatcggccgcgacttcccatggctctgaaaacgatgtttaaaaatcaggagtattgatgaaaatcacgaaggatattctgatcaccggaaccggttgcaccacggatcgggcgatcaagtggctggatgatgtccaggcggctatggacaagttccacatcgagtcgccgcgagccattgcggcctacctagccaacatcggcgtcgagtccggtggactggtgagtctagtggagaatctcaactacagcgcccaaggattggccaacacatggccgcgccggtacgcagtagacccgcgagtccgcccgtatgtcccgaatgctctggcgaatcgtctggcccgaaacccggttgccatcgccaacaacgtgtacgcggatcgcatgggcaatggatgcgagcaggatggcgatggttggaagtatcgcgggcgcggcttaatccagctgaccgggaagtcgaactattctctgttcgccgaagactccggcatggacgttctggagaagccggagcttctggaaactccggccggcgcgtcgatgtcttcggcctggttcttctggcgcaatcgctgcatccccatggcggaatccaacaacttctccatggtcgtgaaaaccatcaacggcgccgcgccgaacgatgcgaaccatggccagctccggatcaaccgttatatgaagaccatcgccgcgatcaatcaaggctcctgatattcgcccaaaagaaaaggccgcttattcagcggcctttttgctttccggctttgcctcttcaaccatcttgacttcaaccggcgcggcggactcttcctgagtgaccgaatccacatagttccctagtgaactcagaacgccgattaacagcgctcttaccaccttgtccttgactgtctcgcctatgatcttggtcagaacggatattaactcttcccggagtctggggctgattcttggccgaaagcgcttgcgatgctctttgcgtttcatgtttagtcctctgtctgcggtcttctcctcaccccgataatggcttggggatgcgctgtgttaatcggaaggttcgggcgctattataactcgtcgaaaatgctcgcgcttaactgtttaacgatacgcaccgcgatattaaatcgccttctttctggccaaggaactctggcggccgggtccggtctaaggcctaatttgtcgacattaaaacgagaaaacccggatcgcctgtagggcaatgcgtccgggtttatttctatctagtgtacgctaggatcagtgacttccgccccacccgtccagccagcaatcgaagacggcgtgcctcggcttgtccttggcgccatgggagaagtgcttgaaccggatgacctggcccttgagatactccctgtcattccagcggcgctgtttctcgtcgtgggtcaggctggaggccgacacgttgaaagtgactccaggccacagacgttcgttgcggcagactaacgcaccgaccattccggacggcgacaggttttctgcgtggctggagcgggccgtgtggccaagttcattgatgaaagcttcattgttgttgtgcatcaactcttccacgtcgatgatctcagcttcatcgtagtcgtatcgcttgactttcacacagtgcccttccttggcagtcgagcgaccgaacttgtacagcccatcagcgcgcttgcccatggaaccttcgaatcccagcattgtgtggcggcgctcgacttcgctgaactgttcgatggaagtcaccagttcctgctcgaccaggtgaatcctctcatagccgaggcagtgacgaaggaagttcacgcgctcggccgccctggctaggcgatcttcggtcggtgcgcgaggatcggtgaaatcatcgaacacatggaaagaccagtccggctcaccgctgtggcggcgaagatcgccggacgacttctggaaaactttcgggtcgctgatgtcgccgcagaccagctcgccgtccaggccgttgaacagtttatcgctgaggtattcgtagatcgattgattgttctgccgcttgagttgacgagtcagcgcctcgccttcgaatacgaagcagcgaaatccatcgatcttcggcgagaaatacatcggcagttggccttccagcagcttcgggtcaaaattcgatgcgagcatgggtttcatacagttctccagaaaagaagcccggcgaaccgggctaaatggcggtaagccggctcagatggtttcgttggcgtggttcagttcggccatgatcgacgcatagcgctcgtccgactccttgatgaacacgccgtcgtacatgacgcctttgcgatccttgatggtgtcgtaggccgcagcgtagcaggcgagcatggtagtgtcgtgctcttccgtcacatcgaacagagtcatgacggccaagaccaggctcttgatggctaatccatgatttccgcgtgccagcgcgccggccagatgtccgaggtgctgcaaatcgtcgccgtaggtgggatgaacttcgacagtctcgctgaagaccgatagatgatcgaacagattttcaccgagttgcgcggccatgatcgtggcaaccaccattacgtcgccgatgccgtctttcacctcgactggtttgttataaacccaggcttcgcaaacttctgcgaactcttcgaccaacttcaggaattgatccttggccgaagagcctttgatcaggttccggtcggaaccccatttaacaaccaggtcgtgaagttcgcgactcatgatttgttcgatattcattctttcgattccttttggatttgggattttactgcgttgattatggacgccgtgctctggcgcgatccatccttggtggtgccgaagtagaaggccattaccgacttcagctcggcgaaccaatagccgatgatggtgccgatggcgaccgaggatgttgggtccatcagagcctcgcggccgaatgtgaagattgcgatgatgatgagaatggagcctgtcagaagagcgaatgtaatcgccgggcgaacgaaatcgttctgctgcgccgcaagcctcctcgcagaatccctgtctgccgcctctgcggcgaactggctaagctcggcctggagctggttctgctcagactgaaggcgattttgttcggcttgaatcgcaagctcctggagacgaacgcgctcggcgctctggagttcggcgagacgcgctagagcttccggattcgcgtctagagcgctagcgaccgaggctgggtcggccttcgaccccagcgccgtcgcgacgatagcgccaacggcggcgcctgcaggcccacccaggagcgaccccatagccggggcagccgcgccgatcttactacctatgtctttccagtccatttcgactcctcaaaagaaaggcgccattacagcgcctttctccggccggtgatttagaactcttcggcttcggtcgcatcgccgacgccaccggcgtcactgcgaggctgttcctgcttgctgtagtccaccttcacctcgccgccgacgaacgacttgtacaggtctgccgcagccttgaagtgatccgggttcttcaccaggccttccagctcgaactggacgccggaccagctacccttgtcgttcgacatgcctacggtggtcatgcggaccaggttggcgaaagtcggcggggtgcgcaggccctgcggggtctgaacctttttctgggacagcgcggtcatgagcttcttcgaggccttgatctgcgaagacgacagggagatcagagcctggccgaaatcgccggtgtccggatcgatgacgatgacgtaatgaccacgggtgtcggcgaagtagtcagacttcttgtcgctgaccgaaccgtcttcgttcggcgcgtacaggcgtccttcgacttccttcaccttggtcgggtctttcatcatttccttgaagtcttcgacgctgatggcgcccttgaaaccgccctcggcctcgcgaccggcccagcggatgaactcgcggcggtacgcggccggaatgatcagcaggccggtcttgccgtcgtaaatcttgccggtgacggtgttcaggaacatgccggccttcgcgccttcgatgtacttcgggtcatcttcatcgacctggggagacatcttctgcagaacctggatgaaggggatggcataggactcggcatcggcgccttcgaagcctgcgccgtcatacgatcccaaatccatgaagtcgggaacttcggtagttgcgacggcgccgccaccggtggcaactgctacggccttggtttcttcggttgcttcggaagtttcggttttcttaccagccatgttaggctccttgtttgtcgaatttcagttatcgctaactgtgggtttataataacggaagttgcaactaagtaaagcaaattacatattaagatttgctctttttcaccttcggtttcgtgatcttggcctctttgtattcgtgcacgccgatgaaatctggcagctcttcgcccttctccagatactcgcggccgaacgcctggagggtctggtaatggacatcgcggttgatggtggcgtcatagccggcttcgatgatggcctcggccgccttcttcgcatcttccatttcgccgcgaccgaactcggccagaaccttggtcttgatgatgccgtcgttgtctgtgtcttccagccacttccagaacttcgatttgttctcttccttgacggaaatgatggccttcggctcgactttgaccgtgcgaccgtccgccagagtagtggtcttttgaccaagctcctccaacagctccggaatggtgttgcgcttgagggttttcagctcctcttccttttcggccagcgccttttgaagatcgaggatttcgacgtccagctgcgaagccttgtccaccaggttcagcagtcgatggccgatgtcggtggcttcgaccgccatttcatccatgacgccaaaatagtcgatttcgcccggtgcgttctctttcaggtattccgggatttcaagctcttgctctttcatgtccgcctccaacttagtgatgttcccttacttgaactaagtattgagtagatattatgccgcatcttccttgatacggctactgatttacatattaaatttcgtcgcgagtgctaacgtcagcctcaaacactccatcaacgacataacttgccaggttgcgcttccactccaagctgacctggattttctcgtcgatggaatccagacagatcaggtcgaagtacaaaaccgagttgacggtgccgattcggtgatttcggtcttcggactgcatccgcaactcgttgtcttcgtcggtcgtgtagtaaatggccacgtctgcggcggtgagcgtgatcccgatccctgctgcggccgggttgcccaggaacacctggacgcgcttggcctggaaatcgtcgatcaatttttcccgctcggcctctttggtctcgccgtagtatgtgccaaacgaaattccttgggcctccagatacgccttgatctggtcgatttcctgaatgcgcatggcccagatgatgatggagcgctccgggtcttcctccagcagaccctccagaagatcagtaaacacggcgaatcgcgggttgtcttcgggcggcaggatcaccggctcgccatagacgttgatatagccggatgcaacttgcttgagcttcgaacgcgctgccgcagcatcgaaagatacgtccagcatgaagtcttcgttcttgagaacgaagtggtagtcttcttccacgcgctggtaaacctttcgctgctccggcgacatttcgaagtatatgcgcttgtacactttgtccggcaggaatgggagtgcttccttcttcgtaacccggaaactgtgcggctcgatcagggaccgaagcttgtccaggttccggaataccgggcgcccacgctcgtctttttcgaccagttgcggcggcatggtttgcttcccttccagcttgcgcatgatagcgatcattcgaggatcgtcactgggaaccaaaacggaaaattcggccacgaacgcccgataggatttcgttccaagaattccatcgcgcaagaattggaactgcatgaacaaatcggtaggcgcccgcgttagaggagttccggaaaggatgcgacgagccacggccttctcacccagctttacgatctttttcgcacgcttggcttgcgggtttttgatcctcgtggactcgtcaacaattgcgcaaaccttgaaagtttcaaggaatcgcaagacttcatcatagccagcctggtgattgatggcgtcaacgttgatggcgaagacgcgaagaactttttcatctgcgaacgtctcggcatacagacgatccaagcgcgccctggcctttttggaagtcggtcggccgcgccaatccacgctcaaagtcttgatcgcgacgtgggtgggaatctcgcgcagaatccagttggtgtggacgcctttgggggcgacgatgagcagcgcgtccactcgcccctgtaggaagaggcgaacggcatcggccaaagtcgtccaggtcttcccggtgccctgctccatcaggtatgcgaaattccgtttgttcagggacgcggccagggcattgaactggtgctgcatagcctcggtcttcatgcccttgacgggatatgttttggctttcatttgttctccaaatcggcgaggaactgaatgatgttgtccagtccttctgcatagctcgcaacttccaccaaatcgcggctgttaagctcgaacaaatcgagcataggattcagcagcagccaatcggttccgatcttggcaaggacaaagccccggccgccccagccgatccgctcccgaaggaatgggatttgcccaggctcgaaacatctggccattgggcaggtggaggcgcgtttcggccactcctccaaagccttgaactcgatccagaactggacgcctcgacgattcaggcaaatcgaatcggacataccagaccgccgcgtctccagaaaatcgatcaggattcggccgagcgagcgctgcttaaacgcattcgccgctttcgtctcgcgatcattcatcgccttcgccctctttggaaactttctctgcttgcgcggccagctttgttttttcgcgttcggtcaatatccgcttgacggccttcacgatgaacatatcgattccgctgagcttccagcctttgatgaggaaccaagagcctgtcggcgttccttcagcaatctgctttccgtattgcagatatttttcaggcctaattctgaaacgtatcggctgatcaaccgagtcgtcaacacacatgatgtcgaggaactgcgactggcccttgtacaccgggtttttcccttgatctgccctcttcttctggcgaatcggttcgttctcatcagacagaacttttttcaccatcttgacaatgaccaggccatcgtctccatcgcggatatcccgaatgttctggatggggtttccggaagttactccaaccaactccggattgtcataagcatgaccccagagcgtgtgagcttcgttcaaatctgcgaattgaacttcagaattcgacagactcgcggcgactttctcccaatcctgaagcgtcttcaggtgggttccggccagctctttatattgagctttcagctccctaagatcgacctttaactccttcagatcggccttcaacagtttttccagttctttgtcttggctgattttcgccgaaagaatctgggcttccagcgctgctacatcagcagccttgtcctcaacatcctgtgccgatatcgggcaattggccagggcgatcctcgcggccttgacgtcatcacgaaggcgcaggaacttctctgccttcgccgggccgaagcctttggcgttcatgatgccgccgatcaggcgtccgtccgccactacccagttaagttcggaatgctccgggtccagggccgtatattctacgccttccttggccaattcgcgaaggatggacacagtttgctggtcgtctttcgccgcccgaagacacgcggccgcgtattccaggcgatgataccgcttcatgtagcaggtccagtacgtcaccacggcgtagctgaccgagtgggagcggttgaatccccaggcgccaaatgtcaccatctcctgccatacacggtgagcatcgtccggggcgacgcctatggtcttggcgccctcgatgaacaattcccggcgcttgttgaagaactcttcgccctttcgcgcagacatggctttccggattgccgacgtttgttcccagtcgaactggccgatgtccttgacgatggacatgatctgttcctgatataggaagacgccgtacgtccctgacagatattgctcgacctgcggaatggtataggtcacaggctcgcgaccggccacgcgctcgatgtacttggtggccatgccagaagacaacggacccggacgggcgagcgccgtgatgtggtcgatgttttcgaacgcggtgatattgatcgcgttcgctaccgagcgaacggcctgcccttcgaactggaagatgccggacattttgtcttcattgaggacgtccagaaccgccttgtcgttcaaaggcaagtcgtacaactcttgcgcggtcacgcagttcgcgtcctggatgactcccagagttcgaaggccgagcgcatcaattttgagaagattcagatattccgaatcgggcttgtcgagctgcgcgacgccttcagaagttaccgtacagaagttgatgacttcatcgttgcagaccaggatgcctgccgcgtggacgccagagtgggatgggtgaatttcgaggtcgcccatgcaggcggacgcgatctcatacttttcgcggaagtcgcggccgggctgagttttttcgaaagtatcctccaatccttttccatatcgttcgtccgccgatgtatattcgatgatcgagtttttgatgttgtcggtatcgtggaaggggatgccgaagcgctttccgacgtgagcgataaccgatgcggccttgagcgtgttaatgttacccaacttcaccacgttccaagtgccatacttctgctggagatattcgaacactagatagcgatgggtatcggcgaagtcgatatctatatcgggaagatcggaccgggaaatgtcgataaagcgctggaagagaaggcgatgagggagcgggtcaacctcggtaatgccaaggagatagcagaccaaagagccggccgaagagccgcgagctgggccgaccagcatatgcttcttggcgaacgcgaccagatctgccacgaccaggaagtagctgtcgaaatctttcagctgaatctgcttgatctcttcttggaatcgatcctcatactcctgggtccattccttgatgtggccgcgactgagacggtaggcttgcccctcgcgagccagcgcgacgatatccccatccaggtggatcataggcgccttcgccagtttcacatccgccaattgttcgactaccgcacgagtattggcggcggcggcatcgaactcttcgcgagacatgatgtggcgtaaacggctccacaactcctcttcggtggcgatgtggcgaaggccgaccgattcccgcaccttccaggccgacgcgaaatcagcatggtcgatggacggcatgtcgttgtaagaggtaattaccaccggctttccgaatgccctggccgtctccatagcgccgtgcgcggcgaccatcgacgcgggattgatgtcaatgtagtcgattccggccagatccagatgggcataggcctcgccagcgaatttgatgacgccgtcagcttcctggaattcttgcggagtcaatccttgattctggaccgacttggaagtcaagcggtagaacttcttggtgtccttggcgagcacccaggctttgagcttcagctctttctcgccatcgtcggcgcatttgatcgggatttccatgccgaatccgcgaggcagttctgccttggcagcggcttgttcccaacggacgtggccccatgttccatcatcgacgatggcgacgaatggggattcgatctctttggcgcgctcgatgatctccgggaatcgaccatatgcggcgccgtaggagtaaccagagcgaacgcggagctgagggaaagacatcatgcggcctccattgcttgatacgcccgatacactcccatgcgcttgcagacttcgtggagcagccgcacgtcgtcgagcgcccggtgtttctgtacatatgggccgcagtagtgctcataaagatgttgcagccgcatgcggtggccgaacaacggcgccgactcttccacagtacagatatcgagcgatgggaaattgacttcgtccaggccgaacttgccgcgagccagatcgcaggtcagcatgaacttatcgaatggcaggttgtgggcaatattcgcgtcggctctggaaaagaagtcgcgaactttctggcgctgatcgaggaaagatgggtgcttgatcaggtcttcgttcttcaacccggtgatcttggtgatgatttcctcgataacgattccaggattgcagatgaactctacttcatccaaaatcttttcgccatcagttatcacgccggcgaattcgatgattctcggctgctttctcagactcaccctttggtggaacgggagtcctgtggtctcagtatcccatacagcgaatatcatgtttgttccctcttatgtcgaaaggccggctgctttcgcgaccggcctgaagagtataccgcgacggctgaagatttacgccttctgtccgtctttcggcgtgatgcggccggagcgcatggtggcgtgaacaaacgccgaatagttgatcgagtccaaggccgaatcggcatccttgaacccgctattcgccaggcgagtgagtttacccaccatgtgcatcacgaacagggcgagtcgatgatcatcggcggtcttcgccaccaggccgttcgggaagaggatttccatgatctttccgtacatcagatcattgcgaccataggtgctctggcgggcgcggaagacttctgctgcggcgtacagattgttgagaacatcttccgcgaaatcatctggatgggaatcatcttcgcccggccagacggattccatggcgaacggcgcggcgtcttcggtcgggtcttcggactgagccgtttcagcgagcggagacggggctttcgcaaacgcctcgtcgagggtaggggcggagttcggggcggccgggaacggctcgcctgccatgtcgttgggcgcgctatcggggtcgctatcggccgcgacggcgaagaacggcgcatcgcagccttccaggttcaggatgtaggagtcgatccccaggctattgtaggcatcgatgatgtcctggcgatcatcgaacgccgcgacgatcttggtgacgccttcgattttcttcaggatgtcgagcgcgactgcccgcttgaactgaggtgccggctcggtgttaccatacggccgcatgatgagttcatactcgcgatgttcggcgatgccgagttcgcggtggagcttggccctggtctggaaaaagtggttgtcggttcggccggtgacgaagaaaatcatgaggtcggcgtcgatggcattcctgatgcgacctacagcgtgcgggttgagagtgtccttgtcgagacgagaatgatactcgtcccattgccgttccaaggcgaagctcttgcggtggctatcgtcgaatacgcagccgtccaggtcgaagatgatgatgccattctttggtttgcgttccatattcagatttccttactggttgctttctgggtgacggttttatcgatgaacgtcccatcagaagtgaggcggaaaacttcgccattctggatgaaatcgaacgattgcacgttcattgtgatgcgaatggattcgctgccgttggtcacttcgacttgtgcgatgtcgccaactttctcgacaatgatcttcatgttacatggacttcccattgacggccacagggttggcctcttgtttttccgatccccagaaatcgcggcgcagttcttcctgctcggccgagcgatccatccaggggcgatagaacttgcactggtagataggttccaacggaacatcaatcacaggaatctgacctggctttgtctccagagcggccatgaaccggtcataggatttctgctggatttcctcttcattcatcaccttcgacccatagcgcgggaaggcgcaggagccggtggcgacgcagtgcggctggagcaggctgtcgaacataggatagacttccagaaccagccggcgcatttcgcggaatacttcctgatattcaccctgggtccgaacgcacaggcgaactttcgccatgtcgctcagagtgcgcagattgaacttggccgcgatcttcgtttccatgttggaagggatgatggcacgagcgtcctggagcgacgcgccggcctccagaagcttctggtagctggtttgcgcgtcggcaatggcgtcatgccacagacggttcagctcttcgcggacatggtaggtcgggtcaggctcgccatttaccgtagccggttcgtcgaattcccagcggaaggcttccggctgaacgacggcgctgatttccagggcgcgactggtttcctgctggtaagcaccggtccgcgtccggacgagttggtgggtaaaattcttgcttacgccctcgatctggaaaatgaagtccacgaattcgaacggcgagcgaatggtgtccagcatgtacttccagtggtcgagcttttcggcttcggtcatggtcgccgggtcttggccgcgcatgcgggtggatttcgtccccaggaggagttcccaggcgttctgggtgtaactgatcagagaaatcttcatcagaaatcttccggaattggcgtgaaggtgaatttttctgtgagagcaagtgccaggccttgggcttgctccttacgaagtccatactgctccatctcttccttaagcagttcgcaggcctccagacgagactcatactcttcagcctcatgaactgacgagaagacggttccatcagaggttctgtatacgagttcaatagccatgatcgcctcagtagcagcggatgatttcggcgcggatatctcgacggtcgaggtagtgctcacgaatcttatcgcgggcgcgctcggcctcttctcgactgccgaacgacaggttgaacgaagtgaaaggcttatcgtccagttcagcgccggtttgatacaggatgcctaccagaacgaaagacggcgcggtcttcggctgctggtcggcttgcatttcgagttcgaggaaggacataggaacctcttcaggatggtctggtgcgtacattaatagcgctcctgctgagcagctacggtttccggctcgtagatgagcatgtcaacgatttccgggcactggcctttcacccagtcgatggccgcgaccagtgtggtggaagcggagaaagagaaagtgcggtaagactcatggatgtacggagaccccatagaatcgcgctcggtggtgcgcgaaatgactgctttgatattaatgatccggcccatcttcggcctccactttagcgattatatctgacaggcttaacttctcgccattcaggaaataactggcgcgaaacttcctgtcgccctctggcccgacgattcgggccgttatggtgagactcccgccgccaagggcatcggtgtcccggaagaaagctagcagcgcccgcttgagcgctgcttcgcgaggatcgacggccattaacctaccacgttccagccgtgctgagcgcaccacacggcaccagcccctgcaggaaggctattcagaaggaacacaggagtcaggcggccgtcctcggtcatatggatgaagtagcgggcgccttcaccgagccactcggccttggcgatagcgcgttcgagattggccttggtggcgtaggttttggtgtggttcttgtcggtggagaaggttacttcgcgggccatttgtcgattccttttggttgaaggggttcgcgtttcgatgagggaatattacgcccacctgatccagaagtaaagcacttttgtaaattacttcacgaacattttcttggccttctgataagacgaagaagtcatcaggcgctcgatgacgtccatgtccgaaaccagatcatccagaaggacgttgcgccaggtagcgaaccggccgagcgagaagatgccagcctcatgggtgagattccagatcatggattcgcgctcgtcgcgaccgagcggaatgattttgcctttggtctggatggtcggctcgccatcttcgatgagctgtttccttctgatgccgaaggccgcgcaaacgtaatccatatcccagtcgctgtcccattcgatggtttcgatctcaccatcagcgttctccaaaacgccattcgcgacggattccacgatcagagtatcgccggtgatggacgcgcgaaatgtcccgaagtcgggactggggaaataaacggtctggaagacgtcacaagggatggaaagcttgtatcgactcacgatgatggatgttcctttaccgaatgacgggtcgatacccaggtccatccccgccgcagccaggttggcgcggaacggcgcggtgcttatgacattcacatggtcatcttgccggcgaaggtactggaagaaagaggcgtcgaaaggacgactccaagtgatgcggttcgccagcttggcgacaagctgctcatagtagtctgccggcgcgatccatcgtttttcagtcgccagattccagatggaccgatccgacaggccgcctgtcactttccttgagtacatgttgcagtagtcgatgcgcggctgggaaatcagctcgtcgtccatgtagatggctttgtgtacagttacttcgcggaacgggatgccggtgagttggccaattactggcgagcggaaccgcaagagtgcggtgtggcgttccttattctcaggcgtcgccgcgtcgatgatttgggcttgaggaaagcgatgcgcggcgatcagtccagcgagtccggcacctacgatgattactttctgatcaggaatcatgatttgttccttctgaatgtacaaaacttgagaggataaaaaagggacccattttcatgagtcccttgaagagctagacgattcaggctcagaggagcggcggcttactcctcctcaccttcggaaccatcggcgccctgatcttcaccgccgtgctcctggccttcgtcatcggccttctcgtcatcgccctgggcagcttcgtcttccttcgaagcgatggcaaccagatctacccagcccatgatttccagcttgctcaggtagctgcggaccgaggtgccatagagaagattggccaccttatcgccgaaggattcgatttcgaccggctcaccaacggtgcagtgctcgttgatgtatgcgaacaccttgccgcgagtcgagaaggcctgcggagtgccatggccgtcgccggtcgggatgaagtgagtggcgcgggggcgacgcgagccgttggacttcaggtcttcgcggcgggcttcggccttcttgcggcgctcttcctgctcttccttgcggcgctgcttctcggcttcgcgctcagccttcttctgctcggccaggcgcttgcgctcttcttcgcgagctactttctgagcttcctgggcggccttcttctcttcggcctttttggcgcgctcggcttccttctcggccttcttctgctcgcgctcggcttccttcgccttcgccttctcggcctgctcggcttccttcgccttggccttttcagcacgctcggcctccttggcggcggccttttccttcgccttctcggcgcgctcggcttccttcttctcgcgctcggccttgcgcttctcttcgcgctcggctttcttctgttcggcttccttggcattggcctcggccttctcggcgcgctcgcgctctttacgttgacgctcggcggccttctcggccttgcgcagggcggctgcttgttccttggtcagctcttcgccttgggtctgttcgttctggtccatgttcttactccgggaatgtttgaaaggatggcttattggcctgtgagaggattatctctaaactaattgaagaagggaataccttcgcctgaacttctctaaatatttttctttcgggaaagtccagactccagggaacttatttatgttagcgaagtttttaactcttacgcaaaaacaacaagtattcaattgcgcgagttatgccagtatacatcaactggctgtaaggaattgaaggcaagttttcttccaacattgcgacccgcttccattccgatccctgcgacttgtggaacgtcatcgcccagccgaagtcgaatccgccaatagccttctgcgcctccagccgcacgtcttcctcggccgaaaaactcagaggattgaacttcacccagcgttcatagttcgtgccgataatgcgaactttggcgaacaacatttcatcaggctcgtcgtcatcctcttgcccttcaggaactggcttgaagtccagcagaatggcttgttcgccattcatgattccatattcgtgctggttcccagtgcaaaccagcttctcgccgattcccggctgcgcacctttgtagccgaggattcgccgagcgcgtgcgttcaagcggcggcgagtattgttgtaggcgcaaaggatcacgccatcgtcatccaggaacgtccgcatttcgtcgtccgacatatcgaagccagcccggactaggatatcatcatactcgcggcagggcaggcgtttgccctggcggacgaacatcgacgctcgaacgatattcccggcgttacgctcgatttcagtcatgactgtgtcgcagctatgttcgtggaaaacctgaacgccgcgcacagggggaacttggccaaagtcgccgatctccagaaccggaattcgatgcgccaacaagcgctcttcatcccactcgccgatcatggacgactcgtcgagcacgaccaacttcggcttctcgtcgagcgagtctttgttggcaaacatgatttcgccgtcttcatcttcaccaatcggccgatagatgaagctgtggagggtccgggcattggtgcaacccttctcgcgaagccgcgctgctgctttcccggttggcgcgacgaagactgtccagtccatcgagcagcaaagttcggcgattatcttcgcgatggaagtcttaccagttccggcgaaaccagcgagtcgatagacctggcggcggtgcgctcgatcacaccaaccgcgataccagtccacaacggaattgatcgcgtcgatctgctgactgtttggtcgaaagccgaatcgctcttcgatctgatcgacggtgaagttagatgctgacatatttgcgttctccaacgctaggtttaatggaatcgaggctcagtttaagcacgccgtccacagaccagccagtgctacgacgatacttgcggccttgcggatcgacatagaagttcttcgtgcgccgcagcagaacataatgccaagcagctccaagcgcgtggacccttcctttatacgggaaagccttcgcctgctctgcggcctctttggccccagggagccagcggacggtcgaaaggaccaggaccgcccccttaatagcctgggaagcggcgcggccgtcctttgggctatagcgatgtctatcgaagtctacccagtggtggttgccgcgccggagcttgaccgttcgggatcgcccctcgaacaccacagtgccttcgtgagttaaaatatgttccgccatcgaatgttcctttataacgtacagttatgctttacctctgcgcaggaagagtatactatcagctgactcgccaaagcgagcgaatttaatccaactttacttcggcaggaaagtggccgatactagcgccgccgcctgtactgccctccaaaacagaggatacattaaatgcaagaatgcaagatttcccgcgaccaactcccggtcggtaatccgaatcccaatgtcgacaagacccgcgacccgaacctgaagcccggcttccttcgccgaagccgcgagctggacccggcgctggccgttcgcattcgtcgcgagctgatccacgccgaagcatccgacttggccaaggccggatgggtcaattcacagtccagcctttatggatcgaaagccttcccgcgccattccgtcgttcgcgttaccggagttccggaagatggggctttcatcggcatgctgatcggcttcatcgagcatcgcgagcatggcgaatgggcggtcatggaagccggaacgaaagaaggcggcgcagtcatcatcccggtcaatcacatcatgcgagcgtcattcgccgaagccgaagagttcgccgaaaagtgggagcggaacttgggctggcgcctcctgcgacagctccgcgagtgcggcgccctggccgggactgaagacgagttcctgcggcggatcatcaatcgatacgttcgtgatcgcacgatcctcgatcaccacaaagtcggcgcggacaaaacctatactgatgcagtactcaaaagcatcggcgaaacatggccgaagattccttcggggaaattcgtcggacaccgagtcgcgcagctcctgatcggccacaagctaggtcgagcggggaccatcctgaatgacctggtggacttcctggagaagttcgcggccgggcgcgataaagttctcaacatcaccatctgtaattgaggtgaatgatatggaagatttgggaaagctgagtccaaagctgagtcctcggcagcatgccgttctactggaaatgtacaggcatcctgagcatccagttcacagatcgccaacgaatttgactcttaaggctttgagacgaaaggggcttgtcgagctatcatggaaggattccgtggctggatatatgttcggtcgccaaccttgctggaacataactgatgccggcagaaggcgaatcctgggagtgctggggaatactatggacaaagagcaaagcgaagatcaccccagcattccggagttcgagaagatcgacgccaaaaaactttatgaggctctggagacgattgcggagctggagaagaagtgggacgaatccgaaaagcgcacacgcgatctggcagaattggagcagccgcaagtggttggctatcgcagcgcagcttctcgcatggtctatgaaaaggactatggactgcagaatcctgagccgatgatgcttgtttcccagcacgaccgcatagccggggcgctcctggctgatttggcgtccatgactaaagcgcgcaatcgctacaacgacctgtggaatcgtgctggtaaccgcctagctttggcgcaagttgaaatccgcaagctcacatcagagcgcgacgcagccctggccagggtcgcagaacttgaaaaggcactggcagaatccgaaaagcgcgggagcgaactggccgcgagctattgcgatggcgtgatcggcgatgaatacggccgccctcattgtcgttataaagtggagcgcgatgccgccctggccaagctcgcggaactggagaagccagaccctgactacacacaacacccgcagatcgtaggctacgctcgcaagaaagagttggagcctttgttggacccatgccaacctgacggcggccacatctacataggcttggaccatccgtcgctctggacagaagagccgccgtatgaatttcttactcccctctacaccgccccggtcgcccaagctcagcacagcgtgccggatgggtggaagctcgtaccgatggacccgacgtcgcaaatgacattagtcggccagtcactgcgttctgactcggtaaacagcatcggcgagatttaccggcaaatgctcgccgtagcgccctcacccatcgatccggccgcgcatcctcagccgtgccaacaaccacaggcccatcctgcccgctgcgggtgcgagcggtaagtgccaagcaaggagttcatgtaatggaacagcagaaaccttcggaagtagatggagccatcgccatgaccgatctcgacattcgcattcttcgaaaggcgaagccagaagcgcaggacgagtgcgccgtgtccatgttcgcagcagcgatccgccagaaactacagcgctcccgcgataaaggccgaggcggctggatcgactgcgacgaagacgttctgatcaacggattcgccgaacatgcgctgaaaggcaatgagaacaacctcctggacctggcgacgttcctgatgttcatgtgggtgcgcggcatcgacgatgcgaagattcccccggcgctcgaaaaggcgagacagcacaagatcatggaagcctggagtcgaatccatgaagatggcctaaactccgccagaaaggcgagtgctgcgcgacagttcgttggagtacctcgccgcaaaggaagaccggagcgacttgcatgaagcctcacgaaataagactggctcaggccgaagaattcctgcgagaactcggcagagggattccggacgacgaacgggtgatggtcggctacgctgaagaagccacagtccagaccgacgagaacggccgcaagctcaacgccggctggtggcctgtgccctggaaggaagggaaatacatcaactcccgatccaacgcctacgcctgtatatcgtcgtccatcaagacgcccaacccgaagacaggccagatgcggtactggcgcggcgaagcctctttcggccacggcctggcgttgatggtcgatgacatcggctccggcaaagggtccaagggtgacttcgaccgcgacgagttccgcgagcgactggagccgaccgcgattgtggagacttcgccgaacaattaccagttctggtatttcttcaaagagccgatgtcccacatgctccagttcaaggcgctgctctattcgttcgtggaccaggtgctaaagaaaggcggcgacaacacagtcaaggacgtcagccgttacggccggatgcccttcggcttcaacaacaagcgcgggaaagacggcaagttcaaatatgccgacgaaaacggcaagcccgaactcgtgcgcctgtacagcgccgactattccaagcgctactcgccggaagagatcgcccaggcctttggcgtccgcatcatcatgccacagatgaagaaggtggagataaaccgcgacgattgggtgtatgaccaagtatggctgaagtatgccgagcacatctgcacgaaatacaagatgggcgaagcggcaggcggccaggtccagcagaatatgtccggcaaataccgcatccgctgtccatggggcgacgagcacaccaacggcgatcctttcggagcatactttcgcggaccgatacctggcgccgagcacgaatatgtgttcggttgcgggcacgatacttgccgcaaagagcatcgccggacttgggcggccttcacggatgaagtcgtgctaccctatatcgtcgaacaattggaaagaatcaaccgccgtcatatcggtgaggagtagacaatatgcaaaacgatcctggaatcctgattaccgccatcggcttgctgttcctcggccttatcatcttcttcgaaggcctaaagggatggaaaatacaagtcgcaaacttcctcgcgtcgcttctgtgcttcttcttcggcctttctgctttgacgttctggttcgtcgttgcgtttgacgtattttaatcgacgaacggtacagaaattttcggatggggacggaacttattagctatgccggtttaggtaggagataatagccgtccctttcgcctcaatgtgtagaggcaatgttgaatccgatcatgtaaagcagaaggcggcaaacctaacatgattatcgacgaagataatatttttgatgatggcgaatcagggtccagtgagtttgatctcacgcagatagaagatgctggaatggaccctttgatgaccgccgcgagcaaggcggccgatgatgcgattgcgaggaacgaaacgcatcgcgcgcaaaaggcggcaagatacgccgaggcgtatgctgaaccagacttgaggaagcgagcgcggttgttgatgctcgaccaggcgttcgatcttccggtcagccgggtggtgaaagggccgttcgatgacttcatcacgaaatacagctcgacgtcagacagcaactacctcgcggtctatgatacgttgttctgtaagggcgacggaaccgtcccccacccgcacttcgacgagtttcgcggccggctggtggaccatcgcggcgtggcgttcaacaacaagaccctcgatccgattgacctgatgggcgccctcgcggctgcggccttggacgatccctcgattaagaagacgattgagacttgctgcgtttgggcgcgtcgatatcgccgcaactcgctgatcgagacgtttgagaagaagataccggagtgggatggcgaagcgcggatcgacacgttactgatcgacttgttcaagccgttcgacaccgagcttaaccggatggtgagcaagtatttctggctgagcttgtactgccgcatcaactaccctggaatttcggcgccgatctcgttggcgttgattggtgggcaggatgcggggaaatcatatttcggcttgttgatctgtaaggagttgtccggtgggcgcgatctggctccagttcagctcgacctgagccgacacgaccagacgccgttcctgcgcaacatcaccggcaactcggttattgcgaacgtcggcgaaatgtccggcttcaaaaagggcgacatggaacgcatcaaagaattcctggtgcgatcttcggatacattcgatcagaagtttgagcctggcgaaacgatcaagcgacaatggatcaccatcatggacggcaacggatacgatggactccagcgggacgactccggcaaccgtcgattctatccgatgttcgtggcacaacttcccgacgaagatggaaagccgaactgggtcaagccgggcgatggtaatgaaccgttcaaggtggacttcaccgacttcggtcgcaaattctggcaagcgatggctgaatgccgcgcatggatcgaagagcatggtgtcgatggatacttgaatatggtgtctgaagcgaaccgcgaagtgcagaacttctctatttcggaaatggagaatgcgcgtggcgtagttcgtgacgatacgattgacatgtatctgatcaatgttctgatcagttgcgagttcgaagagatcaagcctggcaggaatgccaagaatcctggatggagggctgacaccgtcgccattctgaaatggttcgatattctcgccaggaagaagccgatttctcgccacttaactccgcacctgaaggcattgggattcgtcccgaataagaatggcttgaatggctggtgcctgcctgccgagaaagttgttggcggagaactcaatggagcgctgccgcctttcaacgacgctctcatatacataattagaaggaatgactctgctgtcacggatgaggatgctatggcaaaaattcgggcaatacgggccgagcgcgcaaggatattgggcgaggacttctgatggattgatgtagtgtacagggaatttggacatggattaggccgccttcgggcggtcttttctttggtgcggcgtacattcgatttcggtggtgagcaggattggcaggaatgaatacggtaacttggaccgttttagaggctgtatagtggaaagttgatagattttcggtatcggtcgggcgtgtatggtggttggattttgtgtgaaatgttgagaaattgtgggtttgaggtggattttcggtcgataatcgccgcaagttactggatagcgattctgagcggaaaattgggaagcctactgccgcgtgggttagcggccgaaattcctaatttccggtttttaaaaacaaggttaaaagtattctacagcgaaaatcgattgcacaatcctaatagaaaaaatctatcacggacgttacctatctttaaaattaataaaattaatagtaatttggtaatttggtattctttaggatttgaaagcctcgcggcactaagcttgtacatatcccgtcaagtttccgattccagccagctcgcggcagggtcgccggaaacttccggacttccaatccatgggtcgcggcaacaccacggcggactaagcggcaggcgccaaaactcgacgagcggaatcggaaacttggccacacgacagaatcgctcagctggacatatttctaacattcgatttaacactctgccaaaacactcaccgccaccatcgctcgccaaccgccgactcgatcctcacccaccatcgctcgccaaccgccgactcgatcctcacccaccagcggatcgcccatataacatcctataacaccacctaacactcattcaccatcaaacccacccagacctacaggccacccacaagcagcccatagacgcgatccctggccccatagtacaatcgcgccatactcagtgtcgcggcagagcaccaggggccatccgccaaccaagccaccacgacgactccagaatcgaactccagggacgcagcaccaaatgaccaaattctacagccccgacgatctagtcacgccacaggaattcgcagacccgcatttcgcggcgatcaaccaaaagcgattcgacctgtacatcgacctgcgcgtccaaggttacagctcctggcgggtcttccgggccatctggggcgaggagcatatggacggtcccgcgcaggcccgcatcttcgcgatggagtccaacccgtactatcgcaagcagttcaaggccaagttgaacgcgaccaaaacgtccgatttgtggaatccaaagacggcgctccacgaactcctccaaatggttcgtgaccccaccgtcaaggactccagccgtctgtcggccatcaaggaattgaacgttctggctgaaatcacgttcgttgacgagtctggcaaaaccagggtcggtcgcggattggcagacttctacgcatcggaagccgaggctcagaccgccaccgtcgctgctgcggccgaagccaatggctatgtacaggacggtaaagagggcgatttcccgtccccgacgccggaaccgaccgaggaagaccgcgccaaccccatttagacataaaataacatcgttctaggcctgaatcggaccgatctaaggcgacggtagcgggtaggggcgaaaaacgattctagggctgttataggaagccgaccaataacgatcagaagcgacaaagccccggactctagcttagaatccgggggctttcttttgggcgccttattcgccagcttcgatgatttcgaagttgtatttgacgccttcgtgctcgaaagtcatcttgccagccgccttcagctgcatgcggaagcggatgtgtttcgaagaaggcaggccgaactcgatgaatgctgcgttggtggaccggaactcgccgcgcttgcctttgacggttacagccacgccatggcgctgggtgcgtttcttggaaacttccgggtctttccaggagttggcgatggctgccgacaggtctttggtctctttggccttctccggcgcgttcttggcctcttcgcgcatcttccggatttcttccagcgcttcctcttcggtgatctcttcttccggcttcagattctcttcctcggccttctcttcttccttcttcttggaagtgcgggttttgtaaacctttgccggggcttcctcttcctggaaggcttcttcctcggccggcagagcattcaggatggcgaggcagcgacgctcagcagtcttgcggtcagagaaacgcttgacagtcgcatcggcgttgtgggcgttgtagaaggcgaccagttctttcatttctgcgttctggatgtcgccgaaggttttgatggagttggtcattttgcgatcctctgttttggaagatttcgttcgggcttcggtttgtcgccccgttgaaagagattatgcctaggtcgctgctgcgtgtctacatttatttcatcagattgatcgcaaagccgacgaacggtcgtcggatgtgaaaacaccgcagaacaggctgcggtgtttggtgggcgagggcgatggtcagaaagtcgggactgtgatcggctcgattggcgggtcgccgggcttgtcgttgtccgatgcgggagctggactggacgggatcgcgccggaccgaagcgacagagattccgactgcctgctcacctgcggagccggaggagccggaggagccggaggagcttttggcgcagtaggggcaggcgggaccggcaggcctggaggagccatcggcgccctgggaggttccggaagatcgggaagatcgggaagactcggcgctatgccgccaaaggaccgctgcgactgctgcgccggattgtcaccgaacatttcggcggatcggtcgtccttgatgatttgacctatggccgtcttgtcgccacccggttctgctggatcgaagcccgtgaatggagtggtcacgcagcgcatgttcggatgagtcggcagattgttcaggacgatggagtctgcccagacatacgggtttttgtggttgccgggtccgtggctgatgatctcggcaggaatatggccgttcatggtaagccattccgccatcccttgccgagtcagcgggcttaccacgatctgaccagtggactctttggcgatggcgaacagatcaccgaattcgaatccgatgattgtgtagttggacctggactcgccgacgaaagccagagtttcgatgttgtggtggatatcttgatcttcccagatgtacagcatggtgcgctcctcaataaggctgcttgttgtgttcgaccagagacataccggccggaactttgaagcggacgtattcgatcatcatcgccgttcgacgccgattcgtgcccgactcgtcattgacgaatagttcgcactggtgcggaatgactcgcgtcaccaggcactcacctttcgagccgtagaacttgctgtaggctgcgacgcctcgcgtcatgctcagatggatcgtttcgcagagtcgctgcgcggccgacgcgctggacagatcggtcggactgaccgtcacccagtaatggccactttgttctttatcggacataagctgccctccattgataaagcccctgccgagtagcagaggctggttgttagtcgcgcttcatcaagacgactttatcatatgcgcgatacttcccgcgccagtcttcccagtagtcgccggccgggcaggtaagctccagggtgatttcgtcgcgccagcattcgacagaaaggacaattgccttgttcctggctgcggaatccgccctgagcttaatcagaatttcgtcgccagttttcaactcatcaactcttacaacttttgacatggcgttctcctattgggcagcgccgcgagggcggatcgggtcgatgtcatgtaagcagatggtaggatagtccctggccaacttgagcttgaagtccacccagtcagcgccgatgagtgccgagacttcgatgcttactttgctgtgcggcgcagctccagatcgcaggactatggcccgacgccgaacgggatcgttgacgtcaacatgagtgagtatttcgtcgccgacgagcaactcacaggccatcaatattttggccataatacactcctgtatgaatggcgcggccgggaccaatccagccgcgccgatggattaacgtttgtgaaggatggacactgcatccacgtcgaggatgctgatggtacggcgacggcgcggattgctgcgttcatggatgcgaatcagatcagcggatggagcttcgtccaccacccatacgtcttccggtttctgcgtccggagcaggaccgtcacttcagtattctgggcgaggccgttgcagatgaaagtgaacttggacgagggagttctgtacatttcgagattcctttttggacttctggtccggcttctcagccggtgaagagattatgccctgattctcaccgccgagtaaagcatttgtgtaccaattctcccgtcaggtggaaccaaagtgcggtatcgcttatggctacgctaccgcgccatggcccttcttgctcgcacactgcgaaccacaggctgatttccatccttgccaggactcggccgaaagattcgaacctgcgccgactggacaggatgtcgacattcactcgtcgattgacctcataccggcgaccgttgatgacgaagaccagccgcagggtttgtccgtcaagacactcccagtatctggtttcataccgaagccagtagcgctttccagccgggcctaccatggtcatttaatcgatgctcctggccgcgccacgcggtccggtcggcggcgcaggatcgaaccgccccaggatgtagtcgggccggcgcgcttcctgaggacacacggcgagaaggcgccatcctgcgtccagggcgtactggagttcgtccgtgcagcagtcttccttgagcagcagacggttgacgctctggagattcggaccagggatggccgagctggtgtgcgagttccaaccttcgatgccgtccaccatctgtggttggttgatgtagccttcggacctgccagccaaccggctcgcggccagctccaggcgctccagcatgggtcgcagagcagcttctgggtcaatgtcgtcccagagaaggaccaggctgatgatggtatacggatagtccttgtccagatcccaggctgaagcggtcaggcggcccaggccgatttcattacacataacgggaacgtcgttgctccaggtggacggctcccagttccgctcaccaggattcccgattgttacgccttccaggttccccaggagaacgtggagcttgctgacatattccgcctccaaggctttccgctcttcgtcggtctggttgtggcgatagaaggatggagggctgacttttgcatggtagagtttcataactgttcctcggttttggaaggcttgaacgttagagaatggtgtcgcagtatttctcgaaaagactctggcgcttcttctcgcagatcgagcaggtgatttccaggtcgggcagctcgctgtaagtcttgccgagatacagccagcgcttgcacagactgcgaccgtccgccatgaagaaatggactttgcgagcgttgccgggttgcacccagccgcttggtgccggcttcctgctcataccatcaccatgtcgatttcgctggcgaagaagttaacgccgactccatctgcgtagccggtgtaacgcagccgaatagtaccatcgatgtgggcttcttcgacgccgatgacttccaggatggtttcgtcgcagtgcagcttgacgaacatcttgaagccggagccaatcgacgcgaaggcgatctgtttgtacaggtcttgcttgatcatgctttacgctcctgtttgcggatgtattctgccctggcttcggcttcaaatttcgcccaaagcgcgttgtcgactggaccccagggaccggtctgagttccgtccaccggcgcgaacttgccaccggcgcgacgatacttggacagcgttctcaggctgatgattttctcttcttgggaatcgaattgatcgatcatttgacgtacttcccgaaataggaggtgtggaggatttcgcgacctttggtgatggccttgagcttgatgccgaaattcttgatagcccagtccaggtcgtggtgatagaactcgatgatgttgacgatttgaccggcgctgtagtggatgacgcgaatcttgccgttccagcggaaatcttcgcggctgtttacggcctcgactgcgatggtgtcgtttctgccgatgttccatttggagctagtcatgtcgcaatcctctttttggagtgtttcgcattcgatgaggtaactatacctcagccacctcatcgagtaaagcattttcttcagattatctgaaaccttttgaagacaggaattgccgccagagccagtcgatgtgttcgttgcagtaacgctcgccatcggacgacatagataaggcgccatcattgatgccgaagtgggccgcagcgagacattcgaactcgaactggagcgttcctgggcgagggatatgggacgtggcgtatttctgcacggtcagtgatcctcagaaggtttagcgtttgcgatagccgctactttctgcataccgaggcgatagaaatcggcttctttcctggcttttgtaagctgctccatggcgtcgcacgccgtcttgtgctgggcattggcgttcttgatgctgccttccaggctcttgtccagctcttcccggagcgccttctgcgatgctagctctgcctccaaatcctggattctgagctggagctggcgatttgtctcgccaacctggttttcgcgggcgatggagttctgaaggcattcgtcaaggcgagtattttcgcgcaccagctgatgcttttcgactttcgcctttctgcacgtctctcgcatttctgaaagctcaatcgcatgcagatcgtcatccgggtctttacgctcttccttcgactccatccgcaggtagtactggccggctgcgaaggcgagcactgcctggtcggcatacgctgcggcatcggtcatgtatctggatttgtagcgaggcagaaacttgcactcctctggatcccagaggagactatcggcaataggccagaatttgcggaagccatcaggatcgacttctacattgaccatttgcagctggccggcctccacttcgacttccagaggaacctgaatggcgccggtgatgtactggaagtacactatgctagacataacacaatcctcataagaagtcgcggccgggaccatcccggccgcatcgtaatcactcttcgccttcgtccgcgctcagccactcttcgaaggcgaaatttaccttagactcgacccaatcttgaagctcatcggcgaactcgtcactgtcgatgtccatcggaatgcccagagtctcttcgttccacagttcggcattcagttcgaactggatagccggttcgccatccacattcagcaggatgcggtctgcgacttcatattcgtcgacatcgaagaggaaaccgccgctgatgatgtgctggatgaaagcttcgtcgaagttgctgacgccgatattgatctgcttagtcattttttctggccccttatttggcgagtttgtactgagctttgagggtggtcagcttagctttcagggcgatcatagcctggccgcgcaggccttccatttctgcctcgctgatggcgatcttggcggagcggatttgatcgttgatctgggatttggtcatttctgcgttcctctgttttggagtgtttcgcgttcgatgaagagattatgacgctattcagaatggaagtaaagcagaattgtgaaatgtttctcaaagtggacgaacggtatgccccgtcaggaatatttcctcccatggaaggcatttccgcatccgaatgttgattaggtatcccaaagcgcgcagtggcgaatgtgagtccgcacgtacatagggttgtattgtgcgaagtgctcgacggtcgcatccaaggctctgctattgccgcacccttccgctttgcgagccaggaagaatgcttctatttgctggtttgcgttcatcgtcttaccctccaggtgtttgttcgtttcgatgaagagattatgccgttggtcagaatggaagtaaagtgtattaacaataaaattatgttcaccgacgaacggttgtgctcgaccgtccgttgcggcgtcgatatactcgacctattgctgacaccggattgattaga

SEQ ID NO: 8 - DNA, 66323 bp, unidentified
  source 1..66323: mol_type = other DNA; note = EPa9
atgttcaagctcaatcctgcactgcgagcggtctggcgaactcgtgcccgttacaaagtcatctatggcggccgggcgtcttcgaagtcgcacgacgctggcggtatagccgttttcctcgcggccaactacaagctcaaattcctctgtgctcgccagttccagaaccgcatcagcgaatctgtctacacattgatcaaagacaagatcgaaaactcagagtataatggcgaattcatcttcaccaagaactccatcaagcacaagattaccggctcagagttcctgttttatgggatcgcccgtaacctgtcggaaatcaagtccaccgaaggcatcgacattctctggcttgaggaagctcactacctgacccaggagcaatgggaagttatcgagccgaccatccggaaagaaaactctgaaatctggatcatcttcaaccctaacgaagtcaccgatttcgtgtatcagaacttcgtggtcaaacccccgaaagactcctgcgtcaagatgatcaactggaacgaaaatccgttcctcagtgagacgatgctcaaagtgattcacgaagcttatgagcgcgaccgggagcaggccgagcacatttatggcgggattccgaagactggaggcgacaaatccgtcatcaatctcaagttcattcttgcggccatcgacgcccacaagaaactcggctgggagccggccggatcgaagcgcatcggcttcgacgttgcggacgacggcgaggatgcgaacgccactacgctcatgcacggcaacgtcattatggaagttgacgaatgggacggcctggaagatgaactgctcaagtcgtccagccgcgtttacaacctggcgaagatgaaaggtgcctcggtcacttatgactccatcggcgtcggcgctcacgtcggttcgaagttcgccgagttgaacgatgccagccccgacttcaagctgatctatgacccattcaacgcgggcggcgctgtcgataagcctgatgatgtttacatgaagctgccgcacacgacgatcaagaacaaagaccacttcagcaacatcaaggcgcagaagtgggaagaagtcgcgacccgattccggaagacttatgaagcggtcgagcatggaaaggtttatccattcgacgaattgatttcgatcaactctgaaacgattcaccaggacaaactgaatcaactgtgcatcgaactttcgtcgccgcgcaaagacctggacatgaacggccggttcaaagtcgagtccaagaaggatatgcgcgagaaacgcaagatcaagtcaccgaacatcgctgactcggtgattatgtcggccattctgccgatccggaagcccaaaggcttcttcgacttctaaacatagaaaagcccggatcgctccgggcttcgggtcttactcggtgcggttcctggcgctgagtgtcgacgcaacggcctcgccgactcccagggcttcctggccggccgcgagcgcttcggcttccgactcgacgatgaaatcatcaccttggccatcgcctggcggaacctcgaccagcacggcttcttcgccttcgaaccgcaggtcataggtcttttcgacggacagaccgtaacgagcgttgagcgcgtcccagagctgggcctcataggtccgcaggtcttgcagagctttctggtggctgagcatggccatgtcaacggcccgttgcagggtttcgtccaggacgttgaatcgcatgcgaagagaacgaatccgctcgaccacttccgcatccaccacatgtctttcgatcatcacttttcacctttgctgaatgttacgttgtagccgttgtcggccagataggtcagggcgccttcgaaggaagttccgacaaggtgcttgagctgcattttgcgttgcgcggcgatccagaatgccgttccggagaactctgcgcggccttccgacaaaacctttccatcaggcccggcgatccgtacatggacggaagatagcttcagtgccatcagtggaccgtccctgtgaaggcgcgcgccgccgcgcattgatcgcaagggcactccctctggatgcgcgccagatcgtttgcatccagggcgtagagttttccatctacggtatcgtgagccattgcgatgtccggatattcgttttcgtccaggccggatgccgcgcggatgttgttccagatgccggcatgttccgcgcgatggcgcgcggtcaactcatcttgctctttgttcgccctttctacgaatttctccaggacttcggtgaatttctcatcgatgactcgtgcagacttggcggagctgaggcgaatcgggtctttcttcatggtgattctcttttggctggtggttgttcgttgctcaggcctattcacagcctgggcagcatgatgaatatgaacacaaaggctgcaaacgccaatagcgttccggtaagcattttggactgactctgcatctcagcgtactgctcagtggacattccgtgctgcgccgcctcggccgcgaagcgggctttcgcctcgataacttccgggcgcagcgacaggacatattctaaggcctcttcccgcgctttttcggcctcgaccgacctagggtcgcgggccgagacttcgctgtgccctggcctcgcgggatgggcctgcagcgatggcggaagttcggcggccacgactccatagtcggcgcaggcccaagctatcccgatgaggatcgcgaggatggattgaacgattcgcagcatcactttgtcgctaggaaagctcatgatcaatcctccaccgaccgaacgatttccatgttgcgcccggcattggttccggcagtgtaggcgcgccgaccgtcgctgtcgtccaggcgcatgagcttagtaacattggacttcttgtagccaggatcgccgaaatgttcgtgaaccgcagcttccttcaccaccaccagagacgttccggcagaagataccagctccatacgcttcctggtgatggattggaggcgatagctgatttcctgggtcgcggcgagcttgaattgcgcggcaaccttgacgttgaaccgttcgaatccttgagctttctgatactcccggcacagacgatcaacggcctcgaccagggaattgaacatgttcaccgccagctccacgtccgacttgtagcctttaaagcgaacggcatggccccagcgtttggtggtgctgccgtcgcgggcgctcctggacgccttggccgatgctcggtgattgttgacgccaccggcgaaatccatgatgcagtcgttgtacgtcgcaacggccaccgagaagaatttcatccaattcgggattgcggaatagtaacgagtagcgatttgctcgtcgaactcttcgcgaatctcgccggccgcttcgaagtcgtgaagatcatatttgtccttcagcttcttcacgcgctcggcagcgatggccgcttcgtgcggactggaagagtcggccgccatggcggtcagcttgcggatgcggtctttcgctttctcgatggcttccggggtgaattcgttctggtcggtcatgttacgttccttttgtctgaagggtttcgctttcgatggagctattctgccttcatccagaatggaagtaaagcattttcttccattatttcggaagagcctggaaataattccaagcccagtcgcctgcggccaggacgaagatgatgaccgcgaagaacgcgattgcagcgaccagttgcgcgcccggcttcagcttgggatggctgagcttgggctctacgggaacgcccggagtgctggcgctggaaccggcgtctcctgggccgtagccgattccacgttcacgcgcctggagcgacaccagggatttcagatactcggtctgcttttgcgactcttcgtagatgccggcgacggcgaaccagagcgcgaacactacggccgtgcatatgacccaggcgccggtcagcaggagggccagcggaccgatgaggaagacggaagcggccaggacgatggcgccgccccagatgatgaagccggccagaccattggtgatgtcgatacagaactttttcatttttcagattccttcggttacgggatggaggggatttggaactctgcgccgccgagaacatcaatgacgacttcccagagcgtcggaacagaccactggtaacggtcgaagtcggtttcaggatcgacgcccagcgtcacataggaagtggcaggccatttatgaacactgcctttccgcatgagagtcgccacgcggccgtcaccgagcggattcgtcctgtgcggaacgtacgcagacatcgaatattgctgcccggcgtcgacaacaaatctttgcctctggcgcagacatacagagcccacaggattccagccgcgaccgccgcaagcctggcgagccgaagaatgctcataaccttcgtgagtcatttcgccgaggcaagccgagcgatcctcgtaatagttgatgttctccatcgatccaaccagcaccagagactcgaaatcgaatcgatgatcgtggatggccgagtgattgaagcaaagccgacgcggcagctccgggtgccaaacatggaggcgaccggccggaagttggacctgaatgaaccccaggccgtgcagagtgatcttgtccttcatcgggtcatggacggtgctcatggataatcctcagtagcagaaatgtattgtgagagttacgattgacaagccggtcgcccatagaagggcgaaccaggccatggctttgacggtcgtgtagatcatccgaagaattttccggcacagatcgggccaatgcccatttcgatggatgcgtggttggtcaactcgcgaccgcagcaggagcactgaccagtcttccgaccgtaggcgactgccgattccatcggcttttcgaacatcttcagaacgtcgtcgtgctcagtatcggtgcagtcgcgactcttgatgaatttgccattggtgatccggccgaggtagatgtcgcccaggacgtacaggctaccggcgttccggctgtgagcgccagcctctttcacaacaacgatgagcggctcctcgccttcgccagctaggcggattttcgggcgcttgataccagactctttcgccttctcaaacgctttctcgatgccggaaatgtccagagtcggcgcagcagcttcctgcgcgaccactttctcgcgatacttggcgaggttttcgatggcgcgcttcgcagcagcgatctgattttctgtcaaggagccgtatttatacaacgactcctgaaggctctgagcgaagctgaaggaatttccagtccaccactcgatgatgtccgggtgcgcggcttcgaaggccttaattttgaggtcgcgctcttgcgcagcgctacagattttctcgatgcgcttttctgccgccttagcacggctcttggcgcgctgctccgggctggttttgtactctttgtatccgacgccgccgcaggcaaagcaggcgcgaccataagacgaagggccacggtacaggccggtgcctgcgcatttggtgcacttgtcgcgatacagcttcacttccttccgggagttcgggcgggcacccatggacacgtcttccagggtcttcggcgcttcgttgttgatctctacggtagcgaagtcatcacccaggtcttcgaagccggtgaacagattctctgctgcgttcatgtcgattctcctgtttggaaagttcgtttcgatgagttgactatacgccagaagtggaaaaacggtagcgatttctcactaccgttcgtcgggtcgaagacaatcaataaatgtcgctattgatcttgaacccatgctcagcgccgtcgttgtagtcgtactcaacataactgtcgcagtagtcgttcaaatgctgaatgatgccaagaacgtcgttcgcggccttgtgccttttcgcggcgatggtcttggcgatgctgtcgccgacttccaggatttcggccgtccggcgatggatcagcaggcgactccaaagatagagccggacgcgacgaatgatgtcgcgatggcgctccagtcgtccgtgcaactcttcaatttcgtgctcgcgagattttaatactcgtcgaagctgttgaacttccaactccaaatcggccttagtagccatgttcacctcaaaaaggaaaatcgtctgggactccaggaagttcgacgattattgttgagcctgatcggtctagaatgcatccgaccgagccagccctgtgtggatagggtctacacgaactataacaggtgacttccctgactattcgccaggtcgatcctccacaccatctgcaaattggcgggcgcttcgacttcagttttcgttcgtccaggacggcgcgtctgtcgcaggaaaggcagcgtgccttaaccgacgtaaccatgggtatagtcgatcattcggatgagctcatcatcctctgattctctcgacttcagaccgcccaaagagtccgactggccgtcgcatttcgcatcgatatccatcgaagacaggaatcctgccgatactgcgatgatatcaactttgtcgccggccttcttgaagccttcgcactcagcatcgagggccacaattgcactcgcggccatgttcacatgactgatgaggtcggggaagatcacaggaacttcacgcgacatgccacggaccgtcagcttcaggactacatacttcatactcactatcccttttgtatgtgaggaaagaacttgctgttttccggatggtgaaaacgctcggtcgcaggcggtctttcttccggacattgaatcgtcgaaggcgggaaaaccgcgccggcgataatcgccgcgaggagtgcagcggatgtcgacatccagagggcggtttccaggctcacccgaacttccggacggcgcggcttcattcgctccaccctcttcccggttcataggatggtagactgccgccgcgaacccagttgtcccacatatggttcagaccagtcggtggctggggtggcggactgtagaatccgggagtctcagtgctgctcaggaaataaggcgtgcaaacggcctggacgaccaattggtgccgctcccacatcttatcaatcgctcttagcatgacgtcttcgcactgagccttactgtcgaaccgtctgctagtatggtccggcatctggacgcagccgtctccagtgcaaaggaaagcagtagcaatccatacggtgatactcgccatttcgtcaccctctttagttgatgagcagagtctattccatctgctcgccaggagtaaagcgcttttcgtcgggataaatgccgatgatgtctgcgtcgagcatccaaatctccacggacggatcgtcgctgctgatgtggtacaggttgtacagctcccgtccgccgacagcgcgctcgcctcgcggctcaaccgccagaaccttgccgtgcccttctccgtgctcgtccaggtatatgacgtgatcgccgacttcatagctttctttcgtgacgaggcgtgaacgcgagctgttctgcgattccaccacccaggaatccagcacgccgcctttcatgtcgcgaaacaatcttgccgatttgtcgcaatcgaatacgcccagaacttctccgtctttcaacacgatatgtacgattggcaaaagagtattcatgtttaatctccattggttgataattagagtctaatctgccgaaaagttcccgtaaagaattattttctcataactgattagttgcaactgttaatctgatgtatatgtttgaatctcttttgaacgtttgatgtttcccctataataagcgcacacagccaacaaccacgtggaactacaatgtttaaactttcctggatattcgggcgcaaaaaggataatgctgcctgttctgaatcggcgccggagaaagtcgcacaaatccctcaacacgatccgctcgaccccatgatcaagctgggaaggattcgcggctggaacgtcgagccggagaaagccccggtcattcgtagtgtgaaagatttcctggaaccgggcctatctgtcgcaatggatagtgcgtatggtgatggaccaaccccggccgcgaaggctgctgcgggcggccagaatccctatgtcgtcccgactatgttgcaggactggtacaattcccaagggttcatcggataccaagcttgcgcaatcatttcccaacactggttggtggacaaagcttgttccatgtctggtgaagatgcagcacggaacggatgggaactcaaatcggacggcaggaagctatccgatgaacaaagtgcgctgatcgcccggcgcgacatggagtttcgcgtcaaagacaacctcgtcgaactcaacagattcaagaacgttttcggcgttcgtatcgcgctgttcgtcgtggagtctgacgatccggactactacgaaaagccgttcaatccggatggaattacgcccggctcctacaagggaatctcccagatcgatccatactgggcaatgccgcagctcaccgctggctcgacggcagatccgtcttccgaacatttctatgagccggatttctggattatcagcggtaaaaaatatcaccgcagccacctagtggtggttcgtggaccgcagccgccagatatcctgaagcctacatacatcttcggcggtatcccgctcacccagagaatctatgagcgcgtgtatgcagcggaacggacggcgaacgaagccccgctgcttgccatgtcgaagcgaaccagcaccatccacgttgacgtggagaaggccatcgcgaacgaagaggccttcaacgctcgcctggcgttctggatcgccaaccgtgataaccacggcgtgaaagttctgggaattgacgaaggcatggagcagttcgacacgaacctggccgacttcgacagcatcatcatgaaccaatatcagctggtcgcggccatcgccaagactccagccacgaagctcctcggcacttctccaaaaggattcaatgccactggtgagcacgaaacgatttcttatcacgaagaactggagtccattcaagagcacatattcgacccacttcttgaacgccactatttgcttctggcgaagtcggaagaaatcgatgtgcagctggaaatcgtctggaaccctgtggactccacgtccagccagcaacaagccgaattgaacaataagaaagccgcgaccgatgaaatctacatcaactctggcgttgtgtcgccggatgaagttcgcgagcgtctgcgtgacgatccgcgttccggctacaaccgactcaccgacgatcaggcagaaaccgaaccgggcatgtctccggaaaacctggccgaattcgagaaggccggtgcacagtcggccaaggcgaaaggcgaagccgagcgagccgaagcccaggcgggcgccgtagagggcgcaggcgcccctgttcccgccgctccacgcgggactaagcctctcgcgaaagcggccgaggaaggggccagcgaggtcgctgaaccgccgtcgcggccggaccccaaggccgagctgcggaacttgttggtcgatcttttgtcgaagctccaagacctggacgacattaaggcaccggatggcgtagacatagagcacaatgatgcgcctggcttaaagcgcacgtccaaacctggcgtgtctggcatggagccttcggtgttttcgtctaaccgcatcgtcgggcctcgtgatcattcggaactccagagaatcaaggtgaatggaataaccaccttgatcgaaaatccgcgcggaagcattcggcaaggaaaggatgggagttggcgagttcagatgaaacaccactacgggttcatcaagggaacgaaaggcgctgatggggatgaagtcgattgcttcgtcggtccgaatctgggatccaaacgggtcttcgtcgtcaaccaggtgaacaaggaaggtcagtttgacgagcacaagtgcatgctcggcttcaacaacatcaacgatgcgaagtctggatatctgtcctgcttccgtccgggctgggatggtctcggctccatccatgaagttgacctgcccgctttccgtcgctggctggcgaacggcgacaccaccaaaccattcgggggcgagtgatggcattcaaggcctccaaaaagcgcgagcgccgggcacctcttccagtcggaagagggaagcccataattccatcagcaggaatcgaggcctggtatcgaaagcagatgaaggatatttccaagctcatgatctccgactatcgaaacgagattgagaaggcgctgtcccagcctgcggccgaacggttcttcgccagcgacgaatccgtgaacgtcctgttcaagatgacccttcgaagcctacagcagcgatggagccgcatttttgaaggcttcgcggccaagatcgccccggagttcgtcaaccggaccgaagaagccgccaccgccgcgacccttcacagcttgtcggtggccggcgtcgatcagccacgagctgcgtataatgagagcgtcaggaacaccctggaggccgcaaccacttacaatcatactctcatcaccaagatccaagaggaagtccacgagaagatttacacatcagtaatgctgtctctgacttccccgaatccggaagagcaaggagcttccggcataactaacgcacttcgcaaagtcgggaagttttctgaagatcgaatcgaactcatcgcaagagatcaaaccagcaagctttacagttctctgagcgatgagagaatggcggaaaatggcgtcgaggagttcgagtggctacactcttctgccggcaagactcctcgccacacccacctggagaaagatgggaagaggttcaagctgaatgaccccagactttgggagggtccgaaagcagaccaggggccgccaggatgggcgattaactgtagatgcagaaagataccagtcatttgacatcgataggagcgctatatgccgttagttcatggcacttccaatgaggctcgttctgaaaacatcaagcgggaaatcgaagccggtaaagacccaaaacaggctgcggccatcgcttattccatccagcgcagtgagaaagggaagacggcgaaagattgttcgcctaagctcgtcgccgatcttcgcgccctggtggacgctctgtcgaggctcgtgaaatgaaccgcaagacgtgccggcgccgactcgtggtcgatgtaatcagggccaatattcacggcggattcttcagcctgaagtttgccgccatcgatttggcaatcatcggcttcgccatcttgatggcttttggccgataatgctgagaaaatctggattctgactaaaaattctagtccggatagccgcaaattaccgtttacggaaaatagcagtaatttggaaatcctactgccgcgaggctttaacagagccagttcctaatttccgatttagccgcatgcttcaaaagtatatagcctgggaaattagaagtaacgttccaatagaattcatctataagtaacgctataatataacgtcaatctatatactctagacgtattgaaattcaatttttaatcggtaaattggtaatttgaattagtttaggagttgaaagcctcgcggcagtaagcttagacaaatcccgtcaagtttccgagaccaaattaccggattttcgcggctgaggaaactggtaattagatcacaatacaaattataatgtaagttaacagtcgcggctacatctaattattgttccgcttatttacccttagatgtactgcgtatataatacagccatagtccacgactcttcgaattaacgatggcaaagtcgaaaagaaaaattgacgaaaatggatatatgaccatagagggctgcccgatcagctcttatggcgttttccaatattctgctggtcaactcggtcttccgggcgatccgacgcggattgtcaacgtatatcgcccggagtctgccgtcagcgatccggagtacatcgaatctctgaagaatctcccgttgatcgacgagcatgagatgctgtcgggattcgacgatgatgacgatagcgtggcccccgaagacaaaggggtggagggcatcatcacatccaacgcttactacgaagccccatgggcacgcggcgatatccgcatctattcccgcaacatgcagaatcagctggaaaggggcaaagaagacctgtccctaggctatagttgccgctacactgagcaacccggcatctggaacggaacgccttatgaagtcgtccaggacaagatgcgcggcaaccacattgccctggtaaaagagggtcgtgtgccgggggccagagtattggatggtctgtgttttgaccatctcagttttgatttcagaccatccgatgagggtaatgaaatgagtctcaagaaagccaagcggaagccccctgtccagcgcgtagggcaagctgctgactcggcggtcgaagagttgcgcgccctgtggccgaagctatctgcgtctgtccagaagttcctgggcgaagaagagcaggagccggagcatcaggaaggcgcagctccggccgaaccgaccgacagcgagcacctgaccgagcatccgactctggaaggtgctcagaaggatgacgaagagcaggaagaggagccttccgttgtcgatccggccgtggccgccgtcgagccggagcatcaagaaagcgccgcatccgaaatgtccggtgaaggcgaagtcgccgaactgatctctcaggtcagagccattctggctcgactggagggcacggtagccgaaggggcagacgaagagcatggcgaaggtcaagatgtcgtcgagggcttggaggagcagagcagcctcagcggctcgcaaaccgccagcgacgatggtggtgagagcaaggataacagcgaggaacttcctgaaatggcacagaagaacgcgcaagatgctgcaattcgcggtctctatcgcgacattgctgctaaagatcgcctctacaagcgtcttagctccgtggttggtgcgttcgatcaccgagctatggactcggctgaagtcgctgtttacggcgtgaaaaagctgaacatcagctgtgcgaagggccaggaagctctggcgctcgacatgtacctgaaaggcgtcgaagcctcgcgcggcgcggccagccgtcaatcgaaagcccaggattcggccggttctgctccgcagtgtgccgagctggacagctacctgaagggggagtaactcatgttccagaaacaagtttaccgccagtacactcctggttttccgggcgatctgatcgaggacggcccgaagcgggcgcggccgggtcgaatcatggctctgtcggccgtaactccggctgccaccgccaccggccccaaccgcatcagtcgcgctttcggttatgccggtgacgtcagcgccctcggcgaaggtcagccgaagaccatcgcggctcgtgcttctgaagtcgtgatcggcggcgccaacttctttggtgtcctcggtcatccgaagcactatgctctgttcggttcggccggagactccctggctcccagctatgatctgcccgatggcgccgaaggcgagttcttcgatatggccaccggcctggtcgtcgaaattttcaacggcgccgcaaccgccctggacctggactatggtgacctggtcgcctatgtccccaacaacctggctaccgccgacaacgcgcttggcctgccggccggcgccctggttggcttcaaggctggctccatgccgaccggcttggtccagattcccaacgcacgcatcgttaacgccatcagtctgccggcccagtcggcggggaatctggttgctggcgttaccatcgtccagctcacgcagtaaggaggcgtcatgagccagatcagcaagacccattcgcgcctcgcaggccgcaatgcgaaacctttcgacctgaaaaacatcaccaatgacgccgtggcgtctctgcgccgcatcggcctggtattcgatcacgccgtcgtccaggaccagatcaaggccttggcgaaggccggcgcgttccgctccggctcggccatggacagcaacttcaccgccccggtgaccacgccgtccatcccgactcccatccagttcctgcagacctggttgccaggcttcgtgaaggtcatgaccgctgcacggaagatcgacgaaatcatcggcatcgataccgttggctcctgggaagatcaagaaatcgtccagggcatcgtggagccggccggcactgcggtggaatacggcgaccataccaacatcccgctgaccagctggaacgccaacttcgaacgccgcaccatcgttcgtggcgagctgggtatgatggtgggtaccctggaagagggtcgcgcctcggccatccgtctgaacagcgccgaaaccaagcgccaacaggcggccatcggtctggaaatcttccgcaacgccatcggtttctacggctggcagagcggcctgggcaaccgcacctatggtttcctgaacgatcccaacctgccggcattccagaccccgccgagccagggctggtccactgccgactgggcaggcatcatcggcgacatccgcgaggccgttcgccagctgcgtattcagagccaagatcagatcgatccgaaggcggaaaagatcaccctggccctggccaccagcaaggtggactacctgtcggtaaccacgccttacggcatttcggtttcggactggatcgaacagacctatccgaaaatgcggatcgtgtcggctccggaattgtccggcgtccagatgaaaaaccaagagccggaagatgctctggtgctcttcgtcgaagacgtgaacgcggccgtcgatggcagcaccgatggcggcagcgtgttcagccagctggtacagagcaagttcatcaccctgggtgtcgaaaagcgggcgaagtcgtacgtggaagacttctccaacggcaccgccggtgcgctgtgcaagcgtccgtgggctgtggtgcgctacctcggcatctaacagatgcctattcaccaaaggccgggcttccggcctttgttcactctgactctaactcggttgtaggggccggttagggcataattactaggactacgccaatgactgtttatatcgtttcctccatgactcaatcggtgtcttacaatgcgtatgacacctctgatccgtccaatcctcgcctccagcgaaagattctgattcgcggccgcgcaggcatcgcatccgaaacttccggcttcggcgacatgatttccgacgaggccggacgtccgatctggaccccacagggcgattgtactgccgtgagcgattcggatttcgagctgcttcaggccaataagattttcatgcgtcacatggagaagggttatctgcgagtcgtgaagaccgacatcaccagtgaccaccagcggatttccaaagagactcgcaccatggagcgcgatggattccagcctctggatgctactcgcctgcagcagaaaatcaaggtgaccacagccagcgcttcccaggaacaagagttccggatttaaccgagggtttcggtatggtgattttcgacgaacataagtttcgcacgctgtttccggagtttgctgatccagccgcttatccggacgtgcgcctgcagatgtacttcgacattgcgtgcgaattcatttctgatcgcgattcgccataccggattctcaatggtaaagccctggaagcctgtctgtatcttctgaccgcccacctcctgtcgctgtccacgatgcaagttcagggcgcggctggaggtggcgtcactgccggtgggacccagggcggtttcatcaccagcgctactgtcggcgaggtcagcgtggccaagctcgcgcccccggccaagaatggttggcagtggtggctttccgggacgccttatggtcaagagttgtgggcgctcctcagcgtcaaagcggtgggcggattctacatcggcggtcttccagagcgccgaggcttccggaaggttggagggacgttctggtgatccctggtgcgaatcttctgcgaatggccttcggggtcatcggtactcaaattgtgaaatatcgcaagtttgagcagcgagtgaagaatgatcaagctcagtacgtttccatgttcgaggagcctttcgacctggcagcgtctgttcagcgagtccgacgcgatcagtatgtccagtttaatctggagttccaacggaattacgttatgatcttcgccaactttgagatggttgacttggatcgcgatgtggccggtgaccagttcctctggaccggaagagtctttcagctggagtctcaaggctcctggttttatcaggacggctggggagtttgcctggccgtggatatcggtgcggccaagctcactgatgacgggaaaccgactttctaggtgatgtatgtttgacggcgaactgatagcgaaactggttgtcgagttgaatgcggcgatgacatctgctcaagaggctttgcagttcccggattttgaagtcgtccagaaagctcagccgacccaacagggaacgtcaaccaggccgaccatctttttccagaaactgtttgacattcctcgcggctggcctgccaccgattggcacctggacaacacggcccgcaaatatgtagaaataactcgacagcatgtagagacgactttccagatcagttcccttcattggcagaatcctgaaataactcacgtggttacggcttctgatatcgccaactatgtgagggcttatttccaagctcgatccacgattgaacgcgtaaaggaactggacttcctcattcttcgcgtgtctcaaatttccaacgaagcattcgagaacgacaatcaccagttcgaattccacccaagttttgacatggttgtaacttacaaccaatatattcgcctgtacgaaaacgcagcatattcggccgatggggtattaataggcatatgagtctgaggcgcgattcagagctaatcgccgcgcacctccagatgttaagagccatgcgcggcaggtccgtttcagccggatggtattccacggctcgatatcctgacaaggcaggcggatcggtcggaatacaagtcgcgagaatcgcacgtctcaatgagtacggcggaactatcgaccatccgggcgggaccaggtatattagggacgccattgttcggggtcggtttgttggcgttcggttcgtcagaaacgactttccgggagaaaccgaggtaactaagcctcacagaattaccatcccggctagaccgtttatgcgatatgcttggaacttgttttccgcagatcgcgccgcaatccagaaccggatagccatgaggctggccagaggacagatcactccagatcaagctcttgcccagatcggcctggcgttggaaggatacatagccagaagcatcaggaccgggccatgggtggctaactcagcatctacggtcaggagaaagggattcaacagaccgctggtcgatacggcgcacatgcttcaatcgattagcagcagagtaacataaccaggagatcatccagtgatcagtcagagccgttatatccggatcatttcgggcgtaggcgcaggcgctccggtcgcaggccgaaagctgattctgcgcgtcatgactaccaacaacgtcatcccgcccggaatcgtcatcgagttcgacaacgccaacgcagtcatgtcatacttcggcgcgcagtcggaagagtatcagcgggctgcggcttatttcaaattcatcagtaaaagcgtgaattcgccgtccagcatcagcttcgctcgctgggtaaacaccgccatcgcgccgatggttgttggtgacaatctgccgaagaccatcgccgatttcgccggcttctcagcaggggttctgaccatcatggtcggcgcggccgaacagaacatcaccgccatcgatacgtccgcagcgacttctatggacaacgtggcgtcgatcatccagaccgaaatccgcaagaacgccgacccgcagctggcccaggctaccgttacctggaatcagaacaccaaccagttcaccttggtcggcgccaccatcggcaccggcgtcctggctgtggcgaaatctgccgatccccaggacatgtccactgccctcggctggtccacctccaacgtcgtcaacgtcgccggccaggctgccgatcttcccgacgcggccgttgccaagagcaccaatgtcagcaacaacttcggttcgttcctgttcgccggtgcgccgctcgacaatgaccagatcaaggccgtgtcggcctggaacgcggctcagaacaaccagttcatctacacggtcgcaacttccctggcgaacctcggcactcttttcaccttggtgaatggaaacgccgggaccgccctgaacgtgctgtcggcgactgctgccaacgacttcgtggagcagtgccccagcgagattctggccgccaccaactacgatgagccgggcgcttcgcaaaactacatgtactaccaattccctggccgcaacatcaccgtttccgacgataccgttgcgaacaccgtcgacaagagccggggcaactacatcggcgtcacccaggccaatggccagcagctcgcgttctaccagcgcggcattctgtgcggcggtccgaccgatgctgtggacatgaacgtctatgccaacgaaatctggctgaagtcggctatcgctcaagcgctcctggacttgttcctgaacgtcaatgcggttccggcgagcagcactggcgaggcgatgaccctggcggtgctgcagccggttctggacaaggcgaccgccaacggcacgttcacctacggcaaggaaatcagcgccgtccagcagcagtacatcacccaagtcaccggtgatcgccgcgcctggcgtcaagtccaaaccctgggttactggatcaacatcaccttctccagctataccaacagcaacacaggcttgaccgagtggaaggccaactacacgctgatctattcgaagggcgatgccatccgcttcgtcgaaggatcggatgtgatgatctaatggtttgcggcggactcgatccgccgcgaccttccataaatggagtgaggaataagcaatgatcaacatttctgcgttcggctcgatctgccagttcacggcaagcagaactttcccgaacggattcaccgtcaccgagtttgccgacgatgcggaccccatcgacagcccgccgttcactgcggccgataccggcgtcggcctcaacggtgacatggtagtctggaaccgggcgaacatcctggaagtcgtcgttaacgtcattccgaataccgagggcgagcgcaacctggcagtcctgctggatgccaaccgcaccggaaaggacaagtcgggcgctcgtgatgtcgtcggcctggtcgtggcgatgccggacggcagcaaaatcacctgcaccaacggcaccccaatcgacggcgttctgatcaacgcggtggcaagcgtcggccgtctgaagaccaagccgtatcggttccgatttgaaaaagtgatcaaagccggtactagctgatgaagaaaattccgctgacagcagtccccaatcaagcgatctcatttaacgccggtagcagctattggaagattcgcctgtaccagaacatggacatgatgaatgccgatatcagccgcgacggcgtgatcgtttgccatggggttcgctgcttcggcgggattcctcttctccagtacagccatcagtaccgacctgactatggcaatttcgtcttcgaccgcgacgccgattggacattgttcggcgacggcatcaacctgttctatctggacggcgccgaattcgccgagtatcaggcgcttgccacgaggaaagaatgagcacatcaacgatcagaaccgggacgaacaacgatatccttttggacgacaatggaaacatggttatcctcagggatgtcgaagcgtgcgcccaggacgttcgggcggcgatgctcatgcgcaccggcgaaaacattttcgatgtgaactccggcgtgggatatttcgaatacatcttctcgccgcagaaaagctatgatgacgctcgcaaatccatcgcggatgcaattttatcctcgccggatgtgaccggcatcgagcagcttgacatcgacataaccggggaagtcttcggcgtcgatgcgaaagtcatcaccatccacgggcctgttaccacaggagtttgaaatgagtaccatccgcatccaatacgccaacggcacccaactgttcctggacggcaaaaatccgccgcccctggacccgctgccctcgtttaacccgtctgtcgaagatctggaaggcctggaccgcgaaaagaacatcgacaagggcgactcctcgccggccggtcttcccgttcccccggtaaacgtcgattccaatgtcgacaacggcggaaccatcccggctccggtatcgaccgacgctgctgcggccgaatcggccccagaaggcgcccaggaagctcctgcagcaggccaaggcgacgagaaaggcgccgaggaagccccgactacagccccggtagaaaaggccgaggaaacggcctcgccggccgctgaagaggaaaccccggctcccgccaaggccacctctcgcaaaaccaccagcaagtaaggactcgacatgatcaacgtcagcggcttcggcacaggaattgtaatagtttcagcctcatcgttcccgatggggttttccttgtcgaagttcgctgatgatgagagtccgatatcctccaaagagctggagccgttcggatatgagatgctttatgacggcggcctattcgcctttgacaaggctgctcctctggaagtatctgtatccgtcatcgcagggagcgaggatgatattaaccttcgcatccttctcaattccaaaaagggatcattcagatttcttccgggcagcatcccggatatgacgactctcgtggccactcttcctgatggcggccgcaccgttctgtccaatgggactatcatcaagggtccggccatcgacaccatacagaacaccggacgacgcaaaggcaacacgtacacttttgttttcggtagctatcttggcgcccagactgcgcgtcaagccatttctaacgttatccaatcggtgctggaggtggtctgatgttggggattttcaccagcctcctaagttcgcgatctttttcgattgtggaccaaaacacaaaccagctagttgctgcggatttgaggataagccgggtcaacacccggttttcttctgtagggcaacgccacatgctggaagatggtacgaccaagatggattccagaacgatccaccctatggaaatcatcgtcgaagtattttgcccttcaattgatgtcgtcgatcagatcaatcaattgctcctggatcgcgacacactgtacaaagtcatcactcgcggcatggtattcgaacggatgatgtgtaccagcgaagcgctcaatcagactccggatatgatatcggcgactcctgcgcggctgacattctcccaagttctcgtccagaatcccaagcctataatgttcagaaatgcaggggactcttctatgatcgaccgagggctggccctagctgaagacgtggttggctcggccggcgatctgttcgactacgcagtaaacggcgtccagaacgccgcagacttgttctgaggtgccaattgaactctttcctcaagtctattctcaacacgcctactctcaccatacgcaatgatgttaccaaacttcctgtctggaagagtcttcaagtcaagaaagtggaaatttactcgccggcttccgtagtgtcgaaacctctggcgacgaaagaccagacggaagctcaagtgtacaccgaagctctggacattgatgtgaagaatggaaagatcatccaaccggtgcgactccgcatcaatgctatctgtccggacctgtccaccgttgaaagtatcatgaacgctttcaatgataacacctcgactttcgctatcacttctaagtcgatattggccgataaaatggccatcatggcgctcgatgtagatcagtctccagacatgttgaacgcggctgagatcaatatggaattcgagcaggttgagcctccagtattgaatgaattcgatcctgcgttccctcaagatagtccgacttatggggtacagattcaatctctttctgatgctaatttgctggatttgggcgccatcggcgattcgatatcttcggccgcaaaatcgctatataatcgcgtgaccagctacttctgaggatgtatcatgcttgaaatcaatcttcccgatggccgtcaaactcgcgtacaaatcgaggcgtggtcggcattggatggctgggacctccagcgccgtttcgtcgaattcgctgtcagccaagattcagacttccgccgctctttcaccatggaaatcctgggctatgcgaaagtgctgcttggcgacgatgacgccggcattccgctgaccaccgcggcagtcatcaacaaccacctcggccactggaagaacgtggaactggttttcaactctgttctcaagcacaatggcatcgacccggccacgcacgccgaccggccggactattgggaacaagtcggatcgcagatggccatcgcatttctggccgaggcgtccaagctcattggtccagcaatgaagatcgccgaaggactcgccaacaagccggagtgattcatgtctagtgatttggatgaattcatacttcggtatgaggctgatactgccagagccgagcgcaatctggagcgcctccagaaccagatcaggcgcgtgaacagcgcatcgacgagtggccttcaggatttgcgccacttcgcagacggcgcggccaccgaactcggcagagtcgttccgcagattgattctgtgacgagcgcaattcgcggaatgaacgcgcaactggcaataggcgccactggcgtggccctggtcgcggccggcgtcaaggcgttcatgaacaccagggaccagtacaatcagcagcgcatccaggcgatggacatcggcatcgccccggcacgcttggaagagtaccagagaaaattcgttcgccagtccggtggaaccatcagccgcgagcagggcgcggagatgaccaaaaatctggcagacactttccggcgtgcttatcgcgatatcgggcgagtcggcccggaagcgcgaattctgcgtatggccggcgtcgatgtcgggagcttccaaaagggcatgcggccgctcaacgacatcatcaccgatctggccacgaaaatggccaagctgaagccggacgaaatttctgcctacgctgatgcccttggcgtctcgcgagattacctgagcaccctggcgaagatcggcccggccatgggaaaagtcactgagatgacgactgcggaactccagtccagggtccagggcgagtccaacatccagaaattcaacgatgccctggcgaatctcaaccagacgttcactaccctggaaaaccgagtcggcgaaaagctcgcgcctgcgttcaccaagctgatcgaaatcatcgacaagatagtccaggctattcccaatgaagtggaaagcttcgcgaaggacaccaaatcccgttgggaagatggagtgctcgggaaggcgaccgttggcagtgatatcctatccctcctcagccccggcgccctgctcggtcgcctggcagcgtgggggactcgtcgcggcatggaagaatcagggctcatcgacaaggacaaggttcccggcgctcaaaccagcgaagacctggccaagaaacaagaagaccaggacaaggctactaagtccatgaaagagctagagaagctggctgaccagaccacgaagtctaccaatgattttgcggtggcgatcaacatgttcagtggcgcggtatcgtcgttcgcgaatgccgttgacgagcgccaagcttgggcagcctgggcgggggaaattggtcgggcggtcggtatgggaagcaccgcgccgacttcgcgggcaaccggcgtctatccgcacgcgatctatgatcagtcgaagagtggcgcggccggacaagtcttcggcgagccaatcggcgcccagtctcttcgcaatcgcatgttctcgccgcagcgcaaggcagagccggtcaccgttccatcgtacatcaacgatatcatcaaagatgcttcgaagatgtacaacattcctgagctggacatcaagaaactcatatacaccgaaagccgattcaacgccagggccaccagcgaagccggagcgaaaggcctcatgcaactgatgccggaaatcgccaaggcgtatggtatcactgacgtatatgaccctcgccagaacatcctcggcggaacgcgcctactgcgtgaaaacctagatcgagcaaatggcgacatgcggttggccttgacatactatcatggcggactcgatccgaagaactggggcccaaggactcgcgcatatccgggtttggtaatgagcgctccaatcgagctgatggaagaggctcagcgcaagcagaaggctgcggccatggccgtcgccaacgagacgttcgccccggaaggcggcgacatggacattcgtccctatgatggcgggcgactggaaaccccagaccagggcaagaaggaagatgagcgccgcgaagcccgtcgatatgacgacagggttgtgcgaccggaaattcgcatcatcgaccgcatgccagaccgcagcgacggcgaaatcctcaagatgtctagacgtcaagaggccgaccgggcagattctggattccggaagttcccgaatcaagttcgcggcgagaccaagcagaacatccaggctcaactcactgcaggagccatcgcgcaagtgatcggcgttaaccccaaccagatcatgcgccgcgaaatcagccgttctgacttgctgttcggatacaaccaagccatcctgggcaagcagcaggagatcaaggccgccgcgaccgaagccaacaacgtattcctgtctccagccaagctcgccgaagccactgccaaggtgaacgccgcatcgcgagaaatggatattctcaggacgtacggcgagcaacttctgaagagcgctccagagcgcggccaggagctgaccatcggtcgaatcgatatgttggtcaacgttaccggcgcgaattctccggaagaggctcgcgagatattcagcaagcagactgcagaccagctgactacggcaatccaagatgcccaaaacgattccgcaactaagatactctactgatgaaaaagagaattctgcgagtaacattcaacatgccttatggacccgaagtcatccgagaggatttggatgttcgggtccggatcatgaaggctgcgttgcggattcagaaccgggcgactatggaaattttcggcctaaccactcagctgcgtgagtctcttctgtcacagttcaccgcgtggaagcaccggcaacgtcaagtcggcagggaagacgaattgatgatcaaagtgtcggtggaagccggctactctgaccaggggcgcgagcaagtttccagagtctttgtcggcgaagtggccattgtcgatatcatttcgccgccaccggacattggaatccgcatccagtgctacaccaggcaaatcgacaggacgaagaccattcgaaatatgccgcccgccaacacgacgttcgtcaagttcgtcgagtggggcgcgaacgaaatgggattgaacttcatctgcgataccagttacaacgatcaagttctgaagaatccgggccggtctatcactgtcgcgtcggcaatcctggcgtcgattcaggatatgtacatgccggacgtggccgcgttcgttgatgatgacatcttgatcgtgaaggatcgcgataaagtcattcgccctgatgaggtgaccaacgtcaattcgttcgttggaattccatcttggtctgaatggggcgttgaattccagtgtctgtttgagccatcgattcgcgtggctggaggcgtggcggtcgaatcgctcatgaacccgagcgtcaatggcaactatgtaatcactgctctggaatacgatttggccagtcgggatcggccgttctatatcaaagtcatggggagcccagcagcataatggccagggaaatcaaaccgttcaacatgttcggcgttcactatacttcgcggcaattctctgctgtcgatgggctcagcatgatgtcggaaattcagagtgtgccgccagaagaactgctcaagggaaccagtgtattggcgcatccggaagatcatccggaaggcatctggcttcccttgaccgctgcgaacatcaatctttatgtagttgatcgggcgaaagtaatagctcccgtacaagttcttgcacttctgtccgaagtggtaattgactggaactttggtttcctcaaagactggaccggagtcaagattccatccagatttgtcgaagatatcaaaagcgtgaagacggcacattcgccttctgtagttgcgagtttggtagcgaacggctcagcctctatgcgcgagttggaagagtattattcgactcaagatgcatttaagatgatagacatcatgacggcgaagagcgtgaacgaggccttggcgtcagaggcatcgcacaacagaatcaaaaagggataattcctaaccgggcctgggaaggctatactagacctgccaaatcagaggctttcccatgtccaatatttctctaacatcagcaaaagctcccgacagaacgcgactgatcgccgctcttgacgctcggtcgcgacgggatgctctagatttcgaagtaatgataccggctcaggttgttcaatatgaccggaccgagaatatcgcgacgattcaacctctcatcacctgggttgacacggaacacaatgccgtccaaaggcaccagctggtggatattcctgtaatttccatgggggctggcggcttccacataagtttcccgattcagcaaggtgacataggctggatttatgcggccgaccgcgacacgtctcagttcctggagtcgttgtcaatgtcgaagccgaacaccggccgcatccataagttcgagcacggcctgttcatcccggacgtattccgtcgatacaccatcaattccgaagattcggccgctatggtcatacaatcgacttctggagcgaccagaatttcgattcgcggcgataacatcaagataactgcgccgtcgaacgttactgtggatactccgcaggcgaacttcaccggcaatgtgactatcgctaacaccctggtcgtaaacggcatcaacgtgaacaaccacggccacctcgaaaacaacccgcctgatgcccggacgaaaggcggcatggttgcttaaggagattttcatggcaagttttgatttttctgatttaacagcgggggggggttgtaatggctaactacaactacatcgtcgatactggtgtgatagtcgcagataccgccgacgttctgagcgacgttgaggccgagttccgcgccgccctcggtgccaatatcaacttggccgcgagcactccgcagggatcgcttgtcgcggccgaggccatcgcccgttccagtgtcatgcggaatgaagcgcgaattgccaataccataaacccgaacgtttcattcggaacgttcctggacgcgatctgtgccttgatggggatcgagcgcggttctgatctgtcaaccttcggctatggagttcaagtcaccggccgcagccaaacccgcatttccaccgggtctagggtccagactccggccggcgcgatcttcacagtgatgagcgatgtcacgatccctgctggtggtgtcgcgaccatcgatatcaaatcgcaggagtatggcaacattcctctgccggtcgggaatctcatcatcatcgacggaacaattggatggtccggagcaaaagtcatcgcctccactcgcgtcgatccgggcagccgccaaatgagcgatgcagagttgaagaatgcccgcgttaatcgattggccatccaaggccgcaactcgactatggccatcaaggcgtatgtgagcgccgttccaaacgtcacgtcggtgaacgtaatcgagaacaacaccggcgccgttcaagtggtgaatggagtctcgtttacccttccgtatgctgtttgggtctgcgtcgccggaaacccggataaacaagcagtcgccgatgcgttgtgggccgcccataacggcggaactccatgggactatggtgcgacgaacaacggcgtcccggtggacggtccgaatggcgttcctgtgcgcgatccggcgtccggtcgaaagtatgtcgtgaagtggaccactccaattatgtacgatggatatgttaacgtaacagtccagcaaggttcctcctctgtagctccggaagccattcagaacgcagtggtcaattacgcccaggggaaagtggaaggggaagaggggctggtggtgggcgcgagcctgtcggcattcgaagtcgccggcgccatcgctcgcgaaattcccggcatctacatcaaactctgccaggtcgcgtgcgtcgcggctggctcgccggctccggctccgggcgatttcacttcggaatacgtcatgagcgcattcggccaggctaccatttccgttggtaacgttcgggtgactttcgtatgactctgcctgcgtacaattcggacatccaacaagctctgaaatggctccataaccaggcgcctggaatcaccggcctgatccagagaaaggcgcaatggtatgacagattcagccgccaattctgggccaactgggagcgcgacgttttccaattgaaaactgccaacccgttcggccttatggtttggtgcatcatcctcggcacgccttcgaaagggttcggcctttatccaaaaaacagttcttgggcattcggtcggctacgccagaacttcatctatagcggtacacaagttccgccaccggcagacgcatcgcctggcggcaacttctacggtggcggcaatgccgaaattctcaacttggacgaaatcaggaaagtgcttcagctaagatatgtagcgctgatttctaacggctcgattgcatatgtcaatcgcatgcttcgttacatattcaatgatgatgagccatgggacgaggcgaccggtctgtacttctatctcatggactcaaccggcgagaatggccctgtggagaacttggcgatatatcggaaagattgggaaggtatggtgctgttgtccagttcgcccagaacgaaccacgtgctgacatcgacccctgccagcgacgccgattggccgggagtcgatccggccgcgagcggtattccggtaacggtcgaaacggcgtccgctacggccccggacggctccgctacggtgtgcaagcttactaagccggccgggagtaccgcttacgtctccgcgccgatagatgggccgctggggtccggtagcactgtaacgttctcgttcttcgcgaaagccggctccacccgtttcattgcaattcagtcggctgccgatttccccagtcgagccgatgccgttttcgacctggattccgggaacgtaatcagcgatcagatgctggacagcagcgtggtaagcgcccgaatgattcgtctggaaaatggctggtggcgttgcgttctcacgaccaagaccgtcagctcttcgttccgcgctgcttacgtcgctccggcagaaaccaacttcagctggattgattcgaattccagcgcggcgattgacgtgcttatctggggcgctcagatcgaactgggtgatactccaactggatacttggaaactaccggggcgcccgtaaccatgaccgattatgttttgcagaccgcccagaccggaacagtcaagttcacacagccccttccgaccggagtagaagcgtattggactggagactggaaaggcgggactgcagcagaaccggccagattcgcagtcgggaatgggactcaggatacgtttactctgtcagaccccgcatacatcggcctacccaccagtggggcgttcaagctagaatacagggttggtccggcgcttaatctgtcgccgcaattgatcaacctcatgaatgaccgggcagttggtattatgccgacttgcgccggttgcgatgtcaaagtcattcaggagtaatgacgtgatcacacccgacctgatccccagtccgtttgccgctcagggcgataaagacccgattccacaaacctcctccactggcttcgcaaaccttcgcgacggctatacgccggactacgaaatcagcctggcgtcgaacaacccgcaggccaaagcggtcgagcggaaaattcaaaaccaactcttcttcatcgcgacccagaacgcacaggcgtggcagcgacaaatggcaccgccgtggtttcagggcatgcctggcggctacgaacagaatgcagaagtcgtgcgcgtcggaaatgacggcataatgcggcgttatcgttccatggtgaatgccaatgcgagcgaccctctcagcagcacgacttgggaagaacaacccgcatggtcggcgatgcgcttcaacatcccgatgccggccggaggcccaggcctatcttctggcggagaagtcatcacgaccggccgcaacttcaacgacctgttaaatgggacgtgggagttcttctctgattcagtggttatcgcttctcagaatgcccccgtatatccggcttccgctggtgccgctgctggcatgttggaggcgaaatcttgggtgtccggagccaatacgttctgcgtccaacgctacactgatcgcgtcgggaacgtcgctgtgcgcgggcttaatgccggagcgtggaccaactggatgtatgcggtaaacgtcatggcccttcaacaaggtcgggtcacctatggagtcgcggccggatcggcgaacgcttacacgttgacgctagttccgcagctccaaggcggcctggtggatggcatgattcttcgggtcaagttcaacaccatgaacaccggcgcctccaccatcaacgtctccggactcggcgccaaagccatcgtcggcgcggccaacttccctctcaccggcggcgaacttggccaaggactcatcgctgagcttgtattcgacgcagcaggcgaccgctggagaatcctcgcaggcgcgccacgcatccaagttggcaacgccgatcaagattaccaggcccccagctggaaacaggtgaaggattacgtcgcgtcccaaaagctgactgaagtggactgggctgacgtcgtcaacaagccgaacgtcgctatccaagacactacgccgtggttcgccaatctggagctgtctgacgctcggcctttcatcgatttccacttcaacaacaaccgcgccaaagacttcgactatcgctttatctctgaagctgatgggtcgatggcgttctactctcgccaggggtcagctggtcctacccaggatatcctgttcagcaggtcgaatgttacattcctccagccgcgactggatgttgcgaaaaacctcgcgtacatcgcgaactctggtcccctttggcagaacaccaccgccgatcagcccggctggaagttcactttcgcacaaggtgtggacgccaacaacaacgcggttatcgcagtcaataccaccaatccggacggctcctatcgctcacagatcatgcgatgggactgggcgtccacgaacgtcatattcaacaatcgtccgctctttgccggtcaatacactccttgggattctggaaactttgatccctccaccaagttgactgtgaatgccacgaaccaaatcgccggcccgaccgggattcggaatacaaacggcaacaccggcaacatgaacacatggggctccagttccacgacggcttcatacggaaacgctgctcttcaaatcttcgggaaaggtggcggcgagcctgccgcgctttatttcgacaactcccagacaggatggtatctggggatggacaaggatggacagctcaagcgggccggctggtcgctcggcaataacgcctacgtgattaccgacgaatccaacattcgtttccacgtgaattccatggctggcactcctgtttggggcggaaacgaattctgggggccgtggaactttaatccgaacaccaagctgaccatcaaagccggcacccaggaaactagcagcactgcgatattcagcggaactatgccattcgctccaatcgcatcgctgtccgattattctcaggcccctttgacggtttacaacgcgccaaccggtccgtctgcaaaaccggccgtcatcgcgttcattcgtcctggcaactggggcgcgttcttcggcatcgataccgacaacaagctgaaatggggcggcggatcgctcggcaacagttccagggaaatcgccgattccagcaacatcatgaatctttgggcggccaacccgaccgcgccgtcctggaacggccaaaccgtttggcgatccggaaactttgatccggcgacgaaagtggatttgaacgccgcgaacgccaccaacggcaacatgatcttcaaccgcatttctggaactggtagcggcatagcttcgtcaggtcgagttggcgccatcaacctgcagaatggggcgcattcggggcaagcggcagcagtcactttcgagcggggcggcagtatcttcgtcaacttcggcttggataccgacaacgttctcaaagtaggtggcggaaacctgggggcaaatgcctatccggtcatccacgccgggaactacaataactacatcaaccaggcgctggttcaggtgggtcttggcggagtcggttcctatggcatctttgcggttctggacaatgccgctccaaccgcgaccgttcaaccgggagtggttgtggacggttccattctcatctactcgtcttgcgccgcaaactacaatagcggtcaaaggcctgccggaacttggcgctgcatgggatatgtagtcaaccgggatgccaacactcctgactccgcgacccttttccagcgagtgacgtaaaatgaaatggacgcggatcagaaaccctcgttggctggatgaaacaaacatccacgccatggtgactttcgatgagatcggggaagttcctttcaccgccaatccgcacgacgtggaggcccacggaagggccatccacgctgcgatcctatccggggcgcacggacctatcgccccggtcgatgcgaagcgggagcaggccttgcaggacgctatacgggccagggaaaagcgggctatccttcgtgatacccgctggcccatagatcgtcacgacgagcagaggcggctgggtatcgaaaccacggacggacctgggttgatagcagcccttgttcactggaggcagcagattcgcgattggaatagcggggatcggccgcgacttcccatggctctgaaaacaatgttcaagaatcaggagtattgatgaaaatcacgaaggatattctgatcaccggaaccgggtgcaccacggatcgggcgatcaagtggctggatgacgtccaggcggccatggacaagttccacatcgagtcgccgcgagccattgcggcctacctcgccaacatcggcgtcgagtccggtggactggtgagtctggtggagaatctcaactacagcgcccaaggattggccaacacctggccgcgccggtacgcagtagacccgcgagtccgcccgtatgtccctaatgctctggcgaaccgccttgcccgtaacccggttgccatcgccaacaacgtgtacgcggatcgtatgggtaatggctgtgagcagggtggcgacggttggaagtatcgcgggcgtggcctgatccaactgaccgggaagtcgaactattcacggttcgccgaagactccggcatggacgttctggagaagccggagcttctggaaactccggccggcgcgtcgatgtcttcggcctggttcttctggcgcaatcgctgcatccccatggcggagtccaacaacttctccatggtcgttaaaaccatcaatggcgccgcgccgaacgatgcgaaccacggccagctccggatcaaccgctacatgaagaccatcgcctcgatcaatcaaggctcctgatattcgcccaaaagaaaaggccgcttattcagcggcctttttgctttccggctttgcctcttcaaccatcttgacttcaaccggcgcggcggactcttcctgagtgaccgaatccacatagttccctagtgaactcagaacgccgattaacagcgctcttaccaccttgtccttgactgtctcgcctatgatcttggtcagaacggatattaactcttcccggagtctggggctgattcttggccgaaagcgcttgcgatgctctttgcgtttcatgtttagtcctctgtctgcggtcttctcctcaccccgataatggcttggggatgcgctgtgttaatcggaaggttcgggcgctattataactcgtcgaaaatgctcgcgcttaactgtttaacgatacgcaccgcgatattaaatcgccttctttctggccaaggaactctggcggccgggtccggtctaaggcctaatttgtcgacattaaaacgagaaaacccggatcgcctgtagggcaatgcgtccgggtttatttctatctagtgtacgctaggatcagtgacttccgccccacccgtccagccagcaatcgaagacggcgtgcctcggcttgtccttggcgccatgggagaagtgcttgaaccggatgacctggcccttgagatactccctgtcattccagcggcgctgtttctcgtcgtgggtcaggctggaggccgacacgttgaaagtgactccaggccacagacgttcgttgcggcagactaacgcaccgaccattccggacggcgacaggttttctgcgtggctggagcgggccgtgtggccaagttcattgatgaaagcttcattgttgttgtgcatcaactcttccacgtcgatgatctcagcttcatcgtagtcgtatcgcttgactttcacacagtgcccttccttggcagtcgagcgaccgaacttgtacagcccatcagcgcgcttgcccatggaaccttcgaatcccagcattgtgtggcggcgctcgacttcgctgaactgttcgatggaagtcaccagttcctgctcgaccaggtgaatcctctcatagccgaggcagtgacgaaggaagttcacgcgctcggccgccctggctaggcgatcttcggtcggtgcgcgaggatcggtgaaatcatcgaacacatggaaagaccagtccggctcaccgctgtggcggcgaagatcgccggacgacttctggaaaactttcgggtcgctgatgtcgccgcagaccagctcgccgtccaggccgttgaacagtttatcgctgaggtattcgtagatcgattgattgttctgccgcttgagttgacgagtcagcgcctcgccttcgaatacgaagcagcgaaatccatcgatcttcggcgagaaatacatcggcagttggccttccagcagcttcgggtcaaaattcgatgcgagcatgggtttcatacagttctccagaaaagaagcccggcgaaccgggctaaatggcggtaagccggctcagatggtttcgttggcgtggttcagttcggccatgatcgacgcatagcgctcgtccgactccttgatgaacacgccgtcgtacatgacgcctttgcgatccttgatggtgtcgtaggccgcagcgtagcaggcgagcatggtagtgtcgtgctcttccgtcacatcgaacagagtcatgacggccaataccaggctcttgatggctaatccatgatttccgcgtgccagcgcgccggccagatgtccgaggtgctgcaaatcgtcgccgtaggtgggatgaacttcgacagtctcgctgaagaccgatagatgatcgaacagattttcaccgagttgcgcggccatgatcgtggcaaccaccattacgtcgccgatgccgtctttcacctcgactggtttgttataaacccaggcttcgcaaacttctgcgaactcttcgaccaacttcaggaattgatccttggccgaagagcctttgatcaggttccggtcggaaccccatttaacaaccaggtcgtgaagttcgcgactcatgatttgttcgatattcattctttcgattccttttggatttgggattttactgcgttgattatggacgccgtgctctggcgcgatccatccttggtggtgccgaagtagaaggccattaccgacttcagctcggcgaaccaatagccgatgatggtgccgatggcgaccgaggatgttgggtccatcagagcctcgcggccgaatgtgaagattgcgatgatgatgagaatggagcctgtcagaagagcgaatgtaatcgccgggcgaacgaaatcgttctgctgcgccgcaagcctcctcgcagaatccctgtcggccgcctctgcggcgaactggctaagctcggcctggagctggttctgctcagactgaaggcgattttgttcggcttgaatcgcaagctcctggagacgaacgcgctcggcgctctggagttcggcgagacgcgctagagcttccggattcgcgtctagagcgctagcgaccgaggctgggtcggccttcgaccccagcgccgtcgcgacgatagcgcccacggcggcgcctgcaggcccacccaggagcgaccccagagccggggcagccgcgccgatcttactacctatgtctttccagtccatttcgactcctcaaaagaaaggcgccattacagcgcctttctccggccggtgattcagaactcttcggcttcggtcgcatcgccgacgccaccggcgtcactgcgaggctgttcctgcttgctgtagtccaccttcacctcgccgccgacgaacgacttgtacaggtcggccgcagccttgaagtgatccgggttcttcaccaggccttccagctcgaactggacgccggaccagctacccttgtcgttcgacatgcctacggtggtcatgcggaccaggttggcgaaagtcggcggggtgcgcaggccctgcggggtctgaacctttttctgggacagcgcggtcatgagcttcttcgaggccttgatctgcgaagacgacagggagatcagagcctggccgaaatcgccggtgtccggatcgatgacgatgacgtaatgaccacgggtgtcggcgaagtagtcagacttcttgtcgctgaccgaaccgtcttcgttcggcgcgtacaggcgtccttcgacttccttcaccttggtcgggtctttcatcatttccttgaagtcttcgacgctgatggcgcccttgaaaccgccctcggcctcgcgaccggcccagcggatgaactcgcggcggtacgcggccggaatgatcagcaggccggtcttgccgtcgtaaatcttgccggtgacggtgttcaggaacatgccggccttcgcgccttcgatgtacttcgggtcatcttcatcgacctggggagacatcttctgcagaacctggatgaaggggatggcataggactcggcatcggcgccttcgaagcctgcgccgtcatacgatcccaaatccatgaagtcgggaacttcggtagttgcgacggcgccgccaccggtggcaactgctacggccttggtttcttcggttgcttcggaagtttcggttttcttaccagccatgttaggctccttgtttgtcgaatttcagttatttctaactgtgggtttataataacgtaagttgcaactaagtaaagcaaattacatattaagatttgctctttttcaccttcggcttcgtgatcttggcctctttatattcgtggacaccgatgaaatctggcagctcttcgcccttctccaggtactcgcgaccgaacgcctggagggtctggtagtgaacatcgcggttgatggtggcgtcatagccggcttcgatgattgcttcggccgccttcttcgcatcttccatttcgccgcgaccgaattccgccagaactttggtcttgatgatgccatcgttgtcggtgtcttccagccacttccagaacttcgacttgttttcttccttgacggaaatgatggctttcggctcgacttttaccgtgcggccatcagccaaagtcgtggtcttctggccgagttcctccagaagctcaggaatggtgttgcgtttgagggtcttcagctcttcctctttttcggccagcgccttttgtaaatcgaggatttcgccgtccagctgagacgccttgtccaccaagttcagcagtcgatggccaatgtcggtagcttcgactgccatttcatccatgacgccgaaatagtcaatttcgcccggcgcattgtccttcagatactccggaacttccaattcttgctcgctcatgtcagcctccaacttagtgatgttcccttacttgaactaagtattgagtagatattatgccgcatcttccttgatacggctactgatttacatattaaatttcgtcgcgagtgctaacgtcagcctcgaacactccatcaacgacataactcgcaagattgcgcttccactccaagctagtctggattttctcgtcgatggagtccagacagatgaggtcgaagtacagaacagagttgacggtcccgatgcgatggttcctgtcttcagactgcatccgcaactcgttgtcttcgtcggtcgtgtagtaaattgccacgtctgcggcagtgagcgtgatcccgatcccagctgcggccgggttgcccaggaagacttggactcgcttggcctggaagtcatcgatcagtttttctcgttcgtcctctttggtctcgccataataggctccaaacgaaattccttgggtctcaagatacgcagcgatctgaccgatttcatgaatccgcatggcccagatgatgatggaccgttccgggtcttcctccaacagaccctccagaaggtcggtgaacactgcgaatcgcgggttatcttcgggcggcaggattatcggctccccataaacgttgatatagccagacgccacttgcttgagtttcgaacgagccgctgccgcatcgaacgatacatccaacatgaaatcttcgttcttgagcacgaagtggtaatcttcttcaacgcgctgataaaccttcctttgctccggcgacatttcgaaatatatgcgcttgtaaaccttttctggcaggaatggcaatgcctctttcttcgtgactcggaagctgtgcggctcgatcagggaccgcagtttgtcaagatttcggaatactggtcgcccaaaatcgtctttttcgacgagctgaggtggaacagtactcttcccatccaatttgcgcatgatggcgaccattcgcgggtcgtcacttggaaccagaacggaaaattcagccacgaacgcgcgataggatttcgtccccagaattccatcacgcaggaattgaaactgcataaacaaatccgtaggcgctcgcgtcagaggcgtaccagaaagtatgcggcgcgccacggccttctcgcccagctttacgatctttttcgctcgtttggcctgagggttcttgatcctcgttgattcatccacaattgcgcagactttgaacgtcttaaggaatcgctcgacttcgtcatagccagcctgatggttgatggcatcgacgttgatggcaaatacccgaagcactttttcgtcggagaacgtctcggcatataaacgatcaagacgcgccctggcctttttggaagtcggcctgccgcgccaatccacgcacagggtcttgactgcgacgtgagtaggaatttcgcgcagaatccagttagtatgtacgcctttgggggcgacgatgagcagcgcgtcaacccttccttgcaggaagagtctaactgagtctgccaaagtagtccatgtcttcccggtgccctgttccatcaggtaggcgaaatttcttttgtttagggaggctgccagggcattgaactggtgctgcatagcctcggtcttcatgcccttgaccggaaacgttttggctttcatttattctccagatcggcgaggaattggatgatgttgtccagtccttctgcatgactcgcgacttccaccaggtcgcggctgttaagatcgaacagatcgagcatgggattcaaaagtagccaatcggtcccgatttttgccaggacgaagcctcgaccaccccagccgatccgctcccgaaggaaagggatttgtccaggctcgaaacaacgagccattgggcaggtcgaggtgcgtttcggccaagcttccagagccttgaactcaacccaaaactggacgccgcgacgattaagacagatcgaatcggacatgccggaccggcgcgtctccaggaagtcgattaggattcggccgagggagcgttgcttaaaagcattcgcgactttcgtttctcgatcattcatcaccattcccctcttcggaatctttctctgcttgtgctgccaactttgctttctcgcgttcggtcaatatccgcttgacggccttcacgatgaacatatcgattccgctgagcttccatcctttgacgaggaaccaagagccggtcggcgtaccttcggcgatattcttaccgtactgaagatatttttcaggacgaatcctgaaacggatcggttggtcaaccgagtcatccacgcacatcaaatcgaggaactgcgactggcctttgtacaccggattctttccttggtcagccctcttcttctggcggatcggttcattctcatccgacagaactttcttcaccagcttgacgataactaggccatcgtcgccatcgcggatatcccgaatgttctgaatgggatttccggaagtcaccccaaccaactcaggattgtcataggcatgaccccagagcgtatgagattcattcaaatccgcgaattgaacctcagaattggacaaactcgcggcaactttctcccaatcctgaagcgttttgagatgggagccggccagctctttatattgcgccttcaactccttcagttcagctttcaactccttgagatcagctttgagcatcttctccagttctttgtctctgctgactttcgccgaaagaatctgggcttccagcgcggcaacgtcatcggccttatcctctacatcctgcgccgaaatcgggcaattggccagggcgatcctcgcggccttgacttcctcgcgaagacgcaagaatcgctcggccttagccgggccgaagcctttggcgttcatgatgccgccgatcaggcgtccgtccgctacaacccagttgagttcggaatgctccgggtccagggccgtatattctacgccttctttggccaattcgcgaaggatagacacagtttgctggtcgtccttcgccgcccggaggcacgcggccgcgtattccaggcgatgataccgcttcatgtagcaggtccagtacgtcaccacggcatagcttaccgagtgggagcggttaaatccccaggctccgaacgtcaccatttcctgccaaactcggtgggcgtcttccggggcgacacctatggtcttggcgccttcgatgaacagttctcggcgcttgttgaagaactcttcgccctttcgcgccgacatcgctttccggattgccgacgtttgttcccagtcgaactgaccaatgtccttcacaattgacatgatctgttcttggtacaggaacacgccatacgtccccgacaaatactgctcgacctgcggaatggtataggtcacaggctcgcgaccggccacgcgctcgatgtatttagtggccatgccagaagacaacggacccggacgagcgagcgccgtgatgtggtcgatgttttcgaacgcggtgatgttgatcgcattggcgaccgagcggacggcctggccttcgaactggaagatgcctgacatcttgtcttcgttgagaacgtccaaaaccgccttgtcgttcaacggtaagtcgtacaactcttgtgcggtcacgcaattcgcatcttggatgacgccaagcgttcgaaggccgagcgcatcaatcttgagaagattcaaatattccgaatcaggcttgtctagctgcgcgatgccttcagaagtcaccgtacagaaatcgattacttcgtcgttgcagaccaggatgcctgccgcgtggacgccggagtgggatgggtgaatttcgaggtcgcccatgcaggcggacgcaatctcatacttttctcggaagtcgcggccgggttgagttttttcgaaagtgtcctccaatccttttccatatcgttcgtccgccgaagtatattcaatgatcgagtttttgatgttgtcggtatcatggaatggaatgccgaagcgcttcccgacgtgagcgataaccgacgctgccttcagcgtgttgatgttaccgagcttcaccacgttccaagtgccgtatttctgctggagatattcgaacactagatagcgatgggtatcggcgaagtcgatatctatatcgggaagatcggaacgggaaatgtcgataaagcgctggaagagaaggcgatgcgggagcggatcgacctcggtaattcccagcaggtagcagaccaaagagccggccgaagagccgcgagccggaccgaccagcatatgcttcttggcgaaggcaaccagatcggccacaaccagaaagtagctgtcgaagtctttcagctgaatctgcttgatttcttcctggaaccgatcttcgtaaacttgggtccattccttgatgtggccgcgactgagacggtaggcttggccctcgcgagccagggcgacgatatcaccatccaggtggatcatcggcgctttcgccagctttacgtcgaccagctgctcgaccaccgcatgcgtgttgacaacggctttgtcgaactcttcgcgggtcatgatatggcgaagacgggtccacaactcttcctcagtcgcgatgtggcgaaggccgaccgattcccgaaccttccaggccgaagcaaaatctgcatggtcgatggacggcatgtcgttgtaggaggtaatcaccacaggctttccgaacgccctggccgtctccatggcgccgtgcgcggcgaccatcgatgcaggattgatgtcaatgtagtcgattccggccaagtccaagtaggcataggcctcgccggcaaacttgatgatgccgtcagcatcctggaattctttgggcgacaatccttgattctggacagtcttcgaagtaaggcgatagaattttctggtgtccttggctagcgcccaggccttcagcttcagctctttttcgccatcatcggcgcatttgatcgggatttccatgccgaatccgcgaggcaattctgcttttgtagctgcctgctcccagcggacgtggccccaggtcccatcatcgacgatggcgacaaagggcgattcgatttctttggcgcgctcgatgatttccggaaacctgccgtatgcggcgccatatgagtagccggaacgaacgcgtagttgaggaaaagacattatgcggcctccattgcttgatacgcccgatatactcccatgcgcttgcagacttcgtggagcagccgcacgtcgtccaatgcccggtgcttctgaacataagggccgcagtagtgctcatacagatgctgcagccgcatgcggtggccgaacagtggcgccgactcttctacagtacagatatcgagcgatgggaagttgacttcttccaagccgagctttccgcgagccaaatcgcaggtaagcatgaatttatcgaatggaaggttgtgggcaatatttgcgtcggccttcgaaaagaaatcgcgaactttctggcgttgatcgaggaatgatgggtgtttgattaagtcttcattcttcaggcctgtgatctttgtaatgatttcttcgatcacaatcccagggttgcaaatgaactcgacttcatccaaaatcgtctcgccatcggtgatgactccggcgaattcaatgatccttggctgctttctcagacttaccctctggtggaacgggagtcctgtggtctcggtatcccatacggcgaatctcatgtctgttccctcttatgtcgaaaggccggctgctttcgcgaccggcctgaagagtatactgcaacggcgcagggtttatgccttctgtccgtctttcggcgtgatgcggccggagtgcatggtggcgtggacgaacgctgaatagttgatcaagtcaaataccgaatcgtcatcctcaaaaccactattcgccaggcgagtgagtttgccaactgtatgcatcacgaacagggcgagccgatggtcatctgcggtcttcgccaccatgccattcgggaagaggatttccatgatcttgccatacatcagatcatttcgaccataagcgctctggcggtcgcggaaaatttctgctgcggaggataggttgttgagaacatcctccacgaaatcatcgggatcggcatcaccgtcaccaggccaggcggattccatggcgaacggcgcggctgagtcttcggtcggctcttcggtcggtgcttcgtagagcggagacggggcctgcgcaagcgcctcgtcgagggtaggggcggagtaggaggctgcggcgatcgtctcgcctgccatgtcgttgggagcgctaccggggtcgctatcggggtcgctatcggccgcgacggcgaagaacggcgcgttacaaccttccaggtccagaatgtaggcgtcgatgcccaggcccttgtaggcgtcgatgatatcctggcgatcatcgaatgccgcgacgatctttgtcaggccgtcgatcttcttcagaatatctagcgcgactgagcgcttgaactccggcgccggctgggtgtttccatactcccgcatgatgagctcatattcgcgatgttcggcgatacccaggtcgcgatggattttcgccctggtctggaaatagttgttgtcggttcggccggtgatgaagaaaatcatcaggtcggcgtcgatggcgttacggattcgtgcgactgcatgcggattgagcttgtccttgtcgaggcgggaatggtactcgtcccatcgcttttccagggcgaagcttttacggtggctatcgtcgaagacgcatccgtccagatcgaagatcatgatgccattcttgggttttcgtgccatattcagatttcctcgctttctgctttctgggtgatggttttctcgatgaaagcgccatcggaagttagacggaacagttcaccgttctggaccagatcgaacgatttcacgttcatggtgacgagaattgattcgccgccgttggtcacttcgacttgtgcgatgtcaccaaccttctcgatgatgatcttcatgctacattgacttcccattgaccgctacaggattggcctcttgtttctccgatccccagaactcgcggcgcagctcttcctgctcggccgagcgatccatccatggacgatagaacttgcactgatagatcggtttcaccggcaactcaaccacaggaatctggccgggcttcgtctccagagcggacatgaagcggtcataggattgctcatgaatctcatcttcattcagaaccttcgatccatagcgcgggaaggcacaggagccagtagcgacgcagtgcggctggagcagactatcgaacatcggatagacttccagaaccagtcggcgcatttcgcggaaggcttcctgatactccccttgcgtacgaacacacaggcgaactttcgccatgtcgctcagagtgcgcagattgaacttggccgcgatcttcgtttccatgttggaagggatgatggcacgagcatcctggagcgatgcgccggcctccaaaagcttctggtaactggtctgcgcgtcggcgatggcatcgtgccacaggcggttcagttcttcacgggcgtgataggtcgggtccggctcgccattggccgtagcctgctcatcgaaatcccagcggaatgcttccggctgaacaacggcgctaacctccagggcgcgactggtttcctgctggtaagcaccggtccgcgtccggacgagttggtgggtgaaattcttgctaacgccctcgatctggaagatgaagtccacgaattcgaatggcgagcggatggtatccagcatgtacttccagtggtcgagcttttcggcttcggtcatggtcgccgggtcttggccgcgcatgcgggttgatttcgtacccaggagaagttcccaggcgttctgggtgtaactgatcagagaaattttcatcagaaatcttccggaattggcgtgaaagtgaatttctccgtcagcgcaatggccaacgcttgcgcatcctccttgtgtagaccgtatctgtcgatctcttcggccagcaatttgcacgcctccagacggtcttcatactcttcggcgtggcacatggacgagaagatagtgccatcagaggtccggtacaccagttcaatggacattactgcaatcctcagtagcagcggatgatttcggcgcgaatatcgcggcggtccaggtaatgctcaataatcttgtcgcgggcgcgctcggcctcttcgcgactgccgaacgacaggttgaacgaagtgaaaggcttatcgtccaggcgcccatcgccaatcaggtacaggatgcctaccagcacgaaagacggcgaggcctgtcgcgtttgcggcgggtcgatttgcatttcgaggaaagacatgggaacctcttcaggatggtctggtgagtacattaatagcgctcctgctgagcggccactgtttccggttcgtagatgatcatatcaacgatttccgggcactggcttttcacccagtcgatggccgcaaccagcgttgtggcggcgccgaaggtgaaagtgcgataagactcatggatgtacggcgaacccatggagtcgcgctcggtcgtgcgagaaatgactactttgatgttaacgatccggcccatcttcggcctccactttagcgatgatatcggacaggctcagcttctcgccattcaggaaataactggcgcgaagcttcctgtcgccttctggcccgacgatccgggctgttattgtgagactcccgccgccaagggcatccgtgtccctgaagaaagccagcagcgcccgcttgagcgctgcctcgcgaggatcgacttccattaacctaccacgttccagccgtgctgggcgcaccacaccgcgccagttcctgcaggaagactgttaagaaggaatacaggggtcaggcggccatcctcggtcatgtggataaagtagcgtgcactttcaccgagccattcggccttggcgatggcgcgttcgaggttgaccttggtggcgtaggtcttggtggtgtttttgtcggtggagaaggttacttcgcgggccattttgtcgattccttttggttgaagggtttcgcgtttcgatgagggaatactactctcacctggctcagaagtaaagcactttgtgtaaattatttcacgaacatcttcttggccttctgataagacgaagaagtcatcaggcgctcgatgacgtccatgtccgaaaccagatcgtccagaaggacgtttcgccaggtcgcgaaccgaccgagcgagaagatgccggcttcatgggtgagattccagatcatggattcgcgctcgtcgcgaccgagcggaatgattttacccttggtctggacggtcggctcgccgtccggaatgagattcttcttcctgatgccgaaggccgagcaaacttcatccaggtcccagttgctgtcccattcgatggttttgatttcaccatctgcagtctccacgacgcccttagtaacggattcgacgataagggtgtcgccggtgatggacgctcgaaacgttcccacttcgggaccagggaaatacaccgtctggaagacatcacaaggaatggaaagcttgtatctactcacgacgatggaggttccttcgccgaatgacgggtcgatccccagatccagccctgccgcagccagattggcgcggaatggcgccgtgctgatgatattaacgtggtcatcttgccggcgaaggaactggaagaaagaggcgtcgaaaggccttccccagctgatgcgattcgccagcttagcgaccagctgctcatagtagtcggccggagcgatccaacgcttttcggtcgccatattccagatggaccgatccgacaggccgcccgttactttcctggagtacatgttgcagtagtcgatgcgcggctggggagcgaacccgccgtcaatgtagatggccttgtgtacggtgacttcgcggaatgggatgccggtgagctggccgatgactggtgagcggaatcgcaagagcgcgttgtgacgctccttgttctccggcgtcgccgcgtcgatgatttgagcttgagggaagcgatgcgcggcgataagtccggcgagtccggcgcctacaatgatgactttatgatcaggaatcatgatttgttccttatgagtgtacaaaacttgagaggataaaaaagggacccattttcatgagtcccttgaagagctagacgattcagtctcagaagagcggcggcttactcttcttcaccatcggaaccgtcggcgccctgatcatcaccgtcgtgctcctggccttcgtcaccggccttctcgtcatcgccctggccagcttcgtcttccttcgaagcgatggctaccagatcgacccagcccatgatttccagcttgctcaggtagctgcgaaccgaggtgccgtacagcaggtgggccacctgctcgccgaaggattctatttcgaccggctcaccaacggtgcagtgctcgttgatgtaagcaaacaccttgccgcgagtcgagaaggcctgcggagtgccatggccgtcgccggtcgggatgaagtgagtggcgcgggggcgacgcgagccgttggacttcaggtcttcgcggcgggcttcggccttcttgcggcgctcttcctgctcttccttgcggcgttgcttctcggcttcgcgctcggccttcttctgctcggccaggcgcttgcgctcttcttcgcgagcgactttctgggcttcctgggcggccttcttctcttctgcctttttggcgcgctcggcttccttctcggccttcttctgctcgcgctcggcttccttggccttcgccttctcggcctgctcggcttccttcgccttggccttttcagcacgctcggcttccttggcggcggccttttccttcgccttctcggcgcgctcggcttctttcttctcgcgctcggctttgcgcttctcttcgcgctcggctttcttctgctcggcttccttggccttggcttcggccttctcggcgcgctcgcgctctttacgttgacgctcagcagccttctcggccttgcgcagggcggctgcttgttccttggtcagctcttcgccttgggtctgttcgttctggtctttctgttccatgttcttactccgggaatgtttaaagggatggcttattggcctgtgaggggattatctctaaactaattgaagaagggaataccttagcctgaactttcctaaatattttctttcgggaaagtccatactccagggaacttatttatgttcgcgaagttttcaactcttacgcaaaaacaacaagtattcaattgcacgagttatgccagtatacatcaactgactataaggaattgacggcaagttttcttccaacatggcgacccgtttccattccgatccctgcgacttatggaacgtcatcgcccagccgaagtcgaatccgccaatggccttctgcgcctccagccgcgcatcttcctcgaccgaaaagctcaagggattgaacttcacccagcgctcatagttcgtgccgataatgcgaactttggcaaacagcatttcatccggctcgtcatcatcttcttggccttcggggaccggcttgaagtccagcagaatcgcttgctcgccgttcatgatgccatattcgtgctggttcccggtgcacaccagcttctcgccgatttccggttgtacacctttgtagccgaggatgcggcgcgccctggcgttcaaacggcggcgagtattgttgtaggcgcaaaggatcacgccgtcatcgtccaagaacgtccgcatttcgtcgtccgacatgtcgaatccagcccggaccaggatgtcgtcatactcgcggcagggtaggcgcttgccctggcggacgaacatcgacgcccgaacgatattgccggcgttgcgctcgatttcggtcatgatggtgtcacagctgttctcatggaaaatctggacgccgcgcacaggaggaacttggccaaagtcaccaatctccagaaccggaatccggtgcgacagcaagcgctcttcatcccactcgccgatcatggacgactcgtcgagcacgaccaacttcggcttctcgtcgagcgagtctttgttggcaaacatgatttcgccgtcttcatcttcgccaatcggccgatagatgaagctgtggagggtccgggcattggtgcaacccttctcgcgaagccgcgctgctgctttcccggttggcgcgacgaagaccgtccagtccatcgagcagcaaagttcggcgatgatcttcgcgatggaggtcttaccagtaccagcgaagccggcgagtcgatagacctggcggcggtgcgctcgatcacaccaaccgcgataccagtccacaacggaattgatcgcgtcgatctgctgactgtttggtcgaaagccgaatcgctcttcgatctgatcgacggtgaagttagatgctgacatatttgcgttctccaacgctaggtttaattgaatcgaggctcagtttaagcacgccgtccacagaccagccagtatcacgacgatacttgcgaccttgcgggtcgacatagaagttcttcgtgcgccgcagcagaacatagtgccaagcagctccaagtgcgtggacccttcctttatacggaaaagccttcgcctgctctgcggcctccttggctccagggagccagcgtacggtcgaaaggaccaggaccgcacccttaatagcctgggaagcggcgcggccgtcctgtgggctatagcgatgtctatcgaagtctacccagtggtggttgccgcgccggagcttgaccgttcgggatcgcccctcgaacaccaccgtgccttcatgagtaaaaatatgttccgccatcgaatgctcctttataacgtacagttatgctttacctctgcgcaggaagagtatactatcagctgactcgccaaagcgagcgaatttaatccaactttacttcggcaggaaagtggccgatactagcgccgccgcctgtactgccctccaaaacagaggatacattaaatgcaagaatgcaagatttcccgcgaccaactcccggtcggtaatccgaatcccaatgtcgacaagacccgcgacccgaacctgaagcccggcttccttcgccgaagccgcgagctggacccggcgctggccgttcgcattcgtcgcgagctgatccacgccgaagcgtccgacttggccaaggccggatgggtcaattcacagtccagcctttatggatcgaaagccttcccgcgccattccgtcgttcgcgtgaccggagttccggaagatggagctttcatcggcatgctgatcggcttcatcgagcatcgcgagcatggcgaatgggcggtcatggaagccggaacgaaagaaggcggcgcagtcatcatcccggtcaatcacatcatgcgagcgtcattcgccgaagccgaagagttcgccgaaaagtgggagcggaacttgggctggcgcctcctgcgacagctccgcgagtgcggcgccctggccgggactgaagacgagttcctgcggcggatcatcaatcgatacgttcgtgatcgcacgatcctcgatcaccacaaagtcggcgcggacaaaatctacactgatgcagtgctcaaaagcatcggtgaaacatggccgaaaattccttcggggaaattcgtcggacaccgagtcgcgcagctcctgatcggccacaagctaggtcgagcggggaccattctgaatgacctggtggacttcctggagaagttcgcggccgggcgcgataaagttctcaacatcgccatctgtaattgaggtgaatgatatggaagatttgggaaagcccagtattccggagttcgagaagatcgacgccaaaaaactttatgagtctctggagacgattgcggagctggagaagaagtgggacgaatccgaaaagcgcacacgcgatctggcagaagtggaacggccagaggtagtcggctatcgcagcgcggcttctcgcatggtctatgaaaaggactatggactgcagaatcctgagccgatgatgcttgtctcccagcacgaccgcatagtcggggagctgctgactgcattaacctcgatgactgaggcgcgcaatcgctacaacaacctatggaattgcgctggtaaccgcctagctttggcgcaagttgaaatccgcaaagtaacatccgagcgctacgcagccctggccaggatcgctgagctggaaaaggaattggccgaatccgaaaagcgcgggagcgaactggccgcgagctattgcgatggcgtgatcggcgatgaacacggtcatccttattgtcgttataaagtggaacgcgacgccgccctggccgaagtcgagcgcctgcgagaatcaaaatgcgatccttctggcagcttcgacagatgcatgaagatgatgtacgagcgagacgagaacgcaaaacagctagaagtcgccctggccagggtggcggagctggagaaagaactggcgatggcacgcgacgcagcagcaaagggtgatgctgcccgccacgctgctggcggcatggaaatggagattcatgagctgaagatgaagctggccgagctggagaaacaagagccggtggcatggggagccttccatttcggcgggaagcgcgacggcaagctgtatacgcaatgcgaaactgaggctcagatagaggcgtatatcctcgacatgcaccgaagcagcgactcattgacgctcaggaaaggttccctctacaccgcgcctgtagtccaggctcaacccagcgtgcctgatgggtggaaacccgttccgatggaaccgacgccgcaaatgacattcgtcggccagtccctgcgttatgactcggtaaacagcatcggcgagatttaccggcaaatgctcgccgtagcgccctcacccatcgatccggccgcgcatcctcagccgtgccagcaaccacaggcccatcctgcccgctgcgggtgcgagcggtaagtgccaagtaaggagtttatgtaatggaacagcagaaaccttcggaagtagatggagccatcgccatgaccgatctcgatattcgcattcttcgaaaggcgaagccagaagcgcaggacgagtgcgccgtgtccatgttcgcaacggcgatccgccagaaactgcagcgctcccgcgataaaggccgaggcggctggatcgactgcgacgaagatgttctgatcaacggattcgccgaacatgcgctgaaaggcaatgagaacaacctcctggacctggcgacgttcctgatgttcatgtgggtgcgcggcatcgatgatgcgaagattcccccggcgctcgaaaaggcgcggcagcacaagatcatggaagcctggagtcgaatccatgaagatggcctaaactccgccagaaaggcgagtgctgcgcgacaattcgtggaagttcctcggcgcaaggggcgcccggagcggctcgcatgaagcctcacgaaataagactggctcaggccgaagaattcctgcgagaactcggcagagggattccggacgacgaacgggttatggtcggctacgctgaagaggccacagtccagaccgacgaaaacggccgcaagctcaacgcaggatggtggccagttccctggaaggaaggcaagtacatcaattccaggtccaacgcctatgcctgtatctcgtcgtccatcaagacgccaaacccaaagaccggccagatgcgatactggcgcggcgaggcctctttcggccatggcctggcgttaatggtcgatgacatcggctccggcaaagggtccaaaggcgacttcgaccgcgacgagttccgcgaacgcctggagccgaccgcgattgtggagacttcgccgaacaactaccagttctggtatttcttcaaagagccgatgtcccacatgcttcagtttaaggcattgctctattcgttcgtggaccaggtgctaaagaaaggcggtgacaacaccgtcaaagatgtcagccgttatggtcgcatgccattcggcttcaacaacaagcgcgggaaagacggcaacttcaagtatgccgacgaaaacggcaagcccgaactggtgcgcctgtaccacgcagactattccaagcgatactcgccagaggaaatcgcgcaggccttcggcgtccgcatcatcatgccacagatgaagaaggtggagataaaccgcgacgattgggtttatgaccaggtttggctgaagtatgccgagcacatctgcacgaagtacaagatgggcgaggcagctggcggccaagtccaacagaatatgtcaggcaaatatcgcatccgctgcccttggggagacgagcatacaaatggcgatccattcggcgcctactttcgcggaccgatccctggagctgagcacgaatatgtgttcggctgcggccacgatacttgccgcaaagagcatcgccggacgtgggcagccttcacggatgaagtagtgctgccatatatcgtcgaacaattggagagaatcaaccgccgtcatatcggtgaggagtagacaatatgcaaaacgatcctggaatcctgattaccgccatcggcttgctgttcctcggccttatcatcttcttcgaaggcctaaagggatggaaaatacaagtcgcaaacttcctcgcgtcgcttctgtgcttcttcttcggcctttctgctttgacgttctggttcgtcgttgcgtttgacgtattttaatcgacgaacggtacagaaattttcggatggggacggaacttattagctatgccggtttaggtaggagataatagccgtccctttcgcctcaatatgtagaggcaatgttgaatccgatcatgtaaagcagaaggcggcaaacctaacatgattatcgacgaagataatatttttgatgatggcgaatcagggtccagtgagtttgatctcacgcagatagaagatgctggaatggaccctttgatgaccgccgcgagcaaggcggccgatgatgcgattgcgaggaacgaaacgcatcgcgcgcaaaaggcggcaagatacgccgaggcgtatgctgaaccagacttgaggaagcgagcgcggttgttgatgctcgaccaggcgttcgatcttccggtcagccgggtggtgaaagggccgttcgatgacttcatcacgaaatacagctcgacgtcagacagcaactacctcgcggtctatgatacgttgttctgtaagggcgacggaaccgtcccccacccgcacttcgacgagtttcgcggccggctggtggaccatcgcggcgtagcgttcaacaacaagaccctcgacccgattgacctgatgggcgccctcgcggctgcggccttggatgatccctcgatcaagaagacgattgagacttgctgcgtttgggcgcgtcgatatcgccgcaactcgctgatcgagacgttcgagaagaagataccggagtgggacggcgaagagcgaattggcacgctgctgatcgatctttttaagccattcgacaccgaattgaaccggatggttagcaagtatttctggctgagcctgtactgccgcatcaattatccggggatttcggcgccgatctcgttggcgttgattggtgggcaggatgcggggaaatcatatttcggcttgttgatctgtaaggagttgtccggtgggcgcgatctggctccagtccaactcgacctgagccggcatgaccagacgccattcctgcgcaacatcaccggcaactcggttattgcgaacgtcggtgaaatgtccggcttcaaaaagggcgacatggaacgcatcaaagagttcctggtgcgatcttctgatacattcgaccagaagtttgagccgggcgagacgatcaagcgacaatggatcaccatcatggacggcaacggctacgatggactccagcgggacgactctggtaaccgccgtttctatccaatgttcgtggcgcaactgcccgatgaggatggaaagccgaactgggttaagccgggcgatggcaatgaaccgttcaaggtggacttcaccgacttcggccgcaaattctggcaagcgatggccgagtgccgcgcctggatcaaagagcatggcgtcgatggctacctgaatatggtgtcggaagcaaaccgcgaagtccagaacttctctatttcggaaatggagaatgcgcgtggcgtggttcgcgacgatacgattgatatgtatctgatcaatgtactgatcagttgcgagtttgaagaggttaagcctggcaagaattccaagactcctgggtggagggcagacacagtttccattctgaagtggttcgatattctcgccaggaagaagccgatttctcgccatttaactccgcacctgaaagcactggggttcattccgaataagaacggcctgaatggatggctcctgcctgtggataaggtcgctcctggctggtcgaagaatatgcagacgacgctgccaccattcaatgatgcgctggtgtatctgctgagaaagggcgatccggatatgaccgatgaggctgccatggcaaaaattcgagcagtacgggcagagcgagccaagatgttgggcgaggatttctgatgggttggtgaattgtggttggactaggccgccttcgggcggtcttttctttggcgcggagaacattaatttagctcgtgaacaggtgaggtttgaaagctatgtgggaattagggttgggtgaaggcgttgtattatgggaagttgatagattttcggtattggtctggcgtgtatgatggttggattttgtgtgaaatgttgagaaattatgggtttgaggcagattttttgtgggaaatagccgcaaattcctggatagcgattctgactgggaagatgggaggcctactgccgcgtgggttagcggccaaattccctaattcccggtttttcgagcatggtttaaaactattctacagcgaaaatcgattgcacaatcctaatagaaaaaatctatcacggacgttacctatctttaaaattaataaaattaatgggaatttggtaatttggaatagtttagtctttgaaagcctcgcggcactaagcctgtacactacccggcaagtttccgattccgctcaactcgcggcagggtcgccggaaacttccggacttccaatccatgggtcgcggcaacaccacggcggactaagcggcaagtgccaaaactcgacgaacggaaccggaaatttgggagcgcgacagaatcgctcagctggacatatttctaacattcgatttaacactaaatccaaacactcaccaccatcgtctcccgccaaccgccgactcgatcctcacccaacagcggatcgcccgtataacatcctataacaccacctaacactcattcatcatcaaacccacccagacctacagcccacccacaagcagcccatagacgcgctccctggccccatagtacaatcgcgccatactccgtgtcgcggcagagcatcaggcccattcaccaaccaagccaccgcgacgactccagaatcgaactccagggacgcagcaccaaatgaccaaatactacagccccgacgatctagtcacgccacaggaattcgcagacccgcatttcgcggcgatcaaccagaagcgtttcgatctgtatatcgacctgcgcgtccaaggctacagctcctggcgggtcttccgggccatctggggcgaggagcacatggacggtcccgctcaggctcgcatcttcgcgatggagtccaacccgtactatcgcaagcagttcaaggccaagttgaacgcgaccaaaacgtccgacttgtggaatccaaagacggcgctccacgaactcctccaaatggttcgtgaccccaccgtcaaggactccagccgtctgtcggccatcaaggaattgaacgttctggctgaaatcactttcgtggacgagtctggcaagaccaggataggtcgcggtttggccgacttctacgcatcagaagccgaggctcagaccgcgaccgtcgctgctgcggccgaagccaatggctatgttccggaaggcgaagagggcgatttcccgtccccgacgccggaaccgaccgaggaagatcgcgccaaccccatttagacataaaataacatcgttctaggcccgaatcggaccgaactaaggcgacggtagcgggaagggacgaaaaacgattctagggcggttctaggaagtcggagcctaaccctcagaaacgacaaagcccccggactctagcttagaatccgggggctttcttttgggcgccttattcgccagcttcgatgatttcgaagttgtatttgacgccttcgtgctcgaaagtcatcttgccagccgccttcagctgcatgcggaagcggatgtgtttcgaagaaggcaggccgaactcgatgaatgctgcgttggtggaccggaactcgccgcgcttgcctttgacggttacagccacgccatggcgctgggtgcgtttcttggaaacttccgggtctttccaggagttggcgatggctgccgacaggtctttggactctttggctttctccggagcgttcttggcctcttcgcgcatcttccggatttcttccagcgcttcctcttcggtgatctcttcttcaggcttcagattctcttcctcggccttctcttcttccttcttcttggaagtgcgggttttgtagactttggccggggcttcctcttcctgaaaggcttcttcctcggccggcagagcattcaggatggcgaggcagcgacgctcagcagtcttgcggtcagagaaacgcttgacggtcgcatcggcgttgtgggcgttgtagaaggcgaccagttctttcatttctgcgttctggatgtcgccgaaggttttgatggagttggtcattttgcgatcctctgttttggaagatttcgttcgggcttcggtttgtcgccccgttgaaagagattatgcctaggtcgatgctgcgtgtctacatttatttcatcagattgatcgcaaagccgacgaacggttgtcggatgtgaaaacaccgcagagcaggctgcggtgtttgttggcgagggcgatggtcaagcgaacggatcgcccagcatatcttcagacggggcacgttgcatatcgcccagcttgtcttcgtcagttgccggactggacgggatcgcgccggaccgaagcgacagagattccgactgcctgctcacctgcggagccggaggagccggaggagccggaggagccggaggagccggaggagccggaggagcttttggcgcagtaggggcaggcgggcccggcaggcctggaggagccatcggcgccctgggaggttccggaagatcgggaagactcggcgctatgccgccaaaggaccgctgcgactgttgcgccggattgtcgccgaacatttcggcggatcggttgtccttgatgacttgacctatggccgtcttgtcgccgcccggctctgccggatcgaagcccgtgaatggagtggtaacgcagcgcatgttcggatgggtaggcagatttttcaggactatggaatctgcccagacatacggattcttgtggttgccgggtccgtggctgatgatctcggcagggatatggccgttcatggtgagccattccgccatcccttgccgagtcagcgggcttaccacgatctggccagtagactcttcggcgacggcgaacagatcaccgagcttgaacccgatgattatgtagttggacctggactcgccgacgaaagccagggtttcgatgttgtggtggatatcttggtcttcccagatgtaaagcatgatgcgctcctcaataaggctgcttgttgtgttcgaccagagacataccggccggaactttgaagcggacgtattcgatcatcatcgccgttcgacgccgattcgtgccagactcgtcattaacgaagagttcgcactgatgcggaatgactcgcgtcaccaggtcttcgcctttcgaaccgtagaacttgatgtaggctgcgacgcctcgcgtcatgctcagatggatcgtttcgcagagtcgctgcgcggccgacgcgctggacagatcggtcggactgaccgtcacccagtaatggccactttgttctttatcggacataaactgccccctccaatgagaaagcctctgccgagtcgcagaggctggttgttagtcgcgcttcagcagaacgactttgtcatgcgctcgatacttcccgcgccagtcttcccagtattcgccggccgggcagacaagctccagagtgatttcgtcgcgccagcattcgacagaaagtacaatagccttgttccttgctgcggcatctgctctgagcttaatcagaatttcgtcgccagttttcagctcatcaactcttacaactttggccatgacacactcctgtttgaagaggcgcggccggaaccaacccagccacgccgatggattaacgtttgtgaaggatggacacggtgtccacgtcgaggatgctgatggtacggcgacggcgcggattgctgcgttcatggatgcgaatcaggttcgcaactggagcttcgtccaccacccatacatcttcctgcttctgcgtccggagcaggaccgttacttctgtgttctgggcgaggccgttgcaaatgaacgtgaatttggacgagggagttctgtacatttcgagattcctttttggacttcgggtccggcttctcagccggtgaagagattatgccctgattctcaccgccgagtaaagcatttgtgtaccaattctcccgtcaggtggaaccaaagtgcggtatcgcttatggctacgctaccgcgccatggcccttcttgctcgcacactgcgaaccacaggctgatttccatccttgccaggactcggccgaaagattcgaacctgcgccgactggacaggatgtcgacattcactcgtcgattgacctcataccggcgaccgttgatgacgaagaccagccgcagggtttgtccgtcaagacactcccagtatctggtttcataccgaagccagtagcgctttccagccgggcctaccatggtcatttaatcgatgctcctggccgcgccacgcggtccggtcggcggcgcaggatcgaaccgccccaggccgcgccacgcggtccggtcggcggcgcaggatcgaaccgccccaggatgtagtcgggccggcgcgcttcctgaggacacacggcgagaaggcgccatcctgcgtccagggcgtactggagttcgtccgtgcagcagtcttccttgagcagcagacggttgacgctctggagattcggaccagggatggccgagctggtgtgcgagttccaaccttcgatgccgtccaccatctgtggttggttgatgtagccttcggacctgccagccaaccggctcgcggccagctccaggcgctccagcatgggtcgcagagcagcttctgggtcaacgtcgtcccagagaaggaccaagctgatgatggtgtatggatagtccttgtccagatcccaggccgaagcggtcagacggcccaggccgatttcattacacatcacgggaacgtcgttgctccatgtggacggctcccagttccgctcaccaggattcccgattgttacgccttccaggttcccaaggagaacgtggagcttgctgacgtattccgcctccagcgctttccgctcttcgtcggtctggttgtggcgatagaaggatggagggctgacttttgcatggtagagtttcatggcggttcctcggtttttgaaggcttgaacgttagagaatggtgtcgcagtatttctcgaaaggactctggcgcttcttctcgcagatcgcgcaggtgatttccaggtcgggcagctcgctgcaagtcttgccgagatacagccagcgcttgcacagactgcggccgtccgacgtgaagaagtggactttgcgagcattgccgggttgcgcccagccaccttgatcgtttttgcgcttgctcatggcgatatttcctttggatctggaatccatgccgtccgttcgctcacccaaactccgtctacatagatcaggactgacagagcagtcgcgccaaacccgaagcctacatagaatgaaccgggatcgatttccatggtggcgctattggtggcgctattgaaatcgacttcaaagtcgaacatcgaatggccactcataccatcaccatgtcgatttcattgatgaagaaatgaacatcgacaccataagcgcgaccggtgtaacgcagccgagtcgtcccatcaatgtgggcttcctcgacgccgatgacttccaggatggtgtcgttgcagtaaagcttgacgaacatcttgatgccggagccaatcgccgcgaaggcgatctgcttgtacaggtcttgcttgatcatgctttgcgctcctgtttgcggatgtattctgccctggcttcggcttcgaacttcgcccaaagcgcgttgtcgactggaccccagggaccggtctgagttccgtccaccggtgcgaacttgccaccggcgcgacgatacttggacagagttctcaggctgatgattttctcttcttgggaatcgagttggacgatcacttgacatacttcccgaagtagcaggtgtggagtatttccaggcctttggagatagccttcagcttgatgccgaaattcttgatcgcccagtccagatcgtggtgatagaactcgatgatgttgacgatttgaccggcgctgtagtggatgacgcgaaccttgccgttccagcgaaaatcttcgcggctgtttacggcctcgacttcgatggtgtcgtttctgccgatgttccatttggagctagtcatgtcgcaatcctctttttggagtgtttcgcgtttcgatgaggtaactatacctcagtcacctcatcgagtaaagcacttttgaacagattatctgaaatttctggaagacagatccatcggccgattcattcaatcaatggaaccgagactccatccgttgcgggcgaaggccgagcgaccagacagcttgcggcactggatggagctgccatcgtcgaaggtgtaagatacggcccagtccaggcgctcgcgacgtactgccgccgcagcgatatcttccagacgggctttgagaagctgttctgctttggtcatttcgagttcctctttggggcgcttcgtgtttcgatgagatgactataactcagtcacctcatcgagtaaagcgcttctgaggaattatctgaagtttctggaggccagaaattgccgccagagccagtcaacgtgatcgttgagatagcgctcgccatcggacgacagagccaggcatccatcctttatgccgagcttggagccggcaatccattcgaactcgaactggagcgttcctgggcgagggacatgggacatgatgtacttttgcacggtcagtagtcctcgaaaggattcatgttggcgatggccgcgattttctgcatgccgatgcgatagaattcggcttcttccctggacttggccagattctccctggcttcgcacgccagcttgtactggttgttggcgttctggatgcttccgtccagactcctgttcagttcttcccgaagagccttctgcgacgctagctcggcctccaaatcctggattctgagatgaagctggcgatttctttcagcaacctcgtttcctcgagcgatggagttctgaaggcattcgtcaagacgagtattttcgcgcaccagctgatgcttttcgactttcgcctttcggcatgtctctcgcatcgctgaaagctcactggcgtgcaaatcagcgtccgggtctttacgctcttccttcgactccatccgcaggtagtattggccggccgcgaaagcgagcatagcctggtcggcatgctttacggcttcacccatgtagtgggtttcgtagcgaggccgaaacttacactcatctgcgtcccatagcagactatcggcaataggccagaatttgcggaagccatcaggatcgacttctacattgaccatttgcagctggccggcctccacttcgacttccagaggaacctgaatggtgccggtgatgtactggaagtacactatgctagacataacacaatcctcataagaagtcgcggccgggaccatcccagccgcatcgtaatcactcttcgccttcgtccgcgctcagccactcttcgaaggcgaaattcaccttcgactcgacccaatcctgcagctcatcggcgaactcgtcactgtcgatgtccatggtgattcccataacttccatgttccatagcgcggcgttcagttcaaactgcaccatctgctcgccatcgacttccagcaggattcggtctgcgacttcatagtcgtctacatcgaacagatggccgcccgccaggaggtgctggacgaaagcttcatcgaggttggtgacttcgatctggacttgtttggtcattttccgtctccttacttagcggctttgaattgggctttgaggttggccagttcagctttcagatcgatcatcgcctgaccgcgcaggccttccatttcggcctcgctgatcgcgatcttggctgcgcggattttgtcgttgatttgatctttagtcattttcggcttccttttgtttgaagggttttgcgtttcaatgaggagattatgccgaaagtcagaatggaagtaaagcatcttgatgagaaaatttctgcccaccgacgaacggtcgtgctcgaccgtcgatggagggtgtgcataatcgaagtcgcacgacgcgaccggtgatgccccggcgaaccggggcggggtggttaggcggtgcgctcggcggcgcgttctgcgttacggtcgtgcgccatgcgcgcccatactgcggcccagcgcgctttatcggcagagttcggcttgtacacgtcgtcagggtgcggttccgggccgtaggcgttgcagctttcgtcgtattcgtaggtcatcatcttgccctcaatgggtcatggcccggcgaaccgggcgggtgattacttgcgatatttcttaatcaggtcgtgtgccatggcgatggcatcagaataggtttctccgccggcctccatttccttcacagccttattgcgcagtgcgttcagcttgttgccgttgatggtgcctttttcatccttggcagcttcgcaggagtcgcgcagagttttcagggcttggtaggtggcgttcatcgtcttgttctccgggtttcgcgtttcgatgaggagattatgccgatagtcagaatggaagtaaagtgtctgaatgaagaaatttctgaacaccgacgaacggttgtgctcgaccgtctgctgcggtgtcgatatactcggcctattgcgaacaatggactgattaa

SEQ ID NO: 9 - DNA, 66519 bp, Pbunavirus EPa10
  source 1..66519: mol_type = genomic DNA; note = EPa10
atgtacaaactcaatcctgcgctgcgagcggtctggcgaactcgtgcccgttacaaagtcatctatggcggccgggcgtcttcgaagtcgcacgacgctggcggtatagccgttttcctcgcggccaactacaagctaaagttcctctgtgctcgccagtttcaaaaccgcatcagcgaatcggtctacacgttgatcaaggacaagatcgaaaactcagagtataatggcgaattcatcttcaccaagaactctatcaagcacaagagtaccgggtcagagttcctattctatgggatcgcccgtaacctgtcggaaatcaagtccaccgaaggcatcgacattctctggcttgaggaagctcactatctgacccaggagcaatgggaagtcatcgagccgaccatccggaaagagaactcagaaatctggatcatcttcaacccgaacgaagtgaccgacttcgtgtatcagaacttcgtggtcaagccaccgaaagattcctgcgtcaagatgatcaactggaatgaaaatccgttcctcagtgagacgatgctcaaagtcattcacgaagcatatgagcgcgaccgggagcaggccgagcacatttatggcgggattccgaagactggtggcgacaaatccgtcatcaatctcaagttcattcttgcggccatcgacgcccacaagaaactcggctgggagccggccggatcgaagcgcatcggcttcgacgttgcggacgacggcgaggatgcgaacgcaactacgctcatgcacggcaacgtcattatggaagtggacgaatgggacggcctggaagatgaactgctcaagtcgtccagccgcgtttacaacctggcgaagatgaaaggcgcctcggtcacttatgactccatcggcgtcggcgctcacgtcggatcgaagttcgccgagttgaacgatgccagtcccgacttcaaactgatctatgatccattcaacgcgggcggcgctgtcgataagcctgatgatatctacatgaagctgccgcacacgacgatcaagaacaaagaccacttcagcaacatcaaggcgcagaagtgggaagaagtcgcgacccgattccggaagacttatgaagcggttgagcatggaaaggtttatcccttcgacgaattgatttcgatcaactctgaaacgattcacccggacaaactaaatcaactgtgtatcgaactttcgtcgccgcgcaaagacctggacatgaacggccggttcaaagtcgagtccaagaaggatatgcgcgagaaacgcaagatcaagtcgccgaacatcgctgactcggtgattatgtcggccattctgccgatccggaagcccaaaggtttcttcgacttctaaacacagaaaagcccggatcgctccgggcttcgggtcttactcggtgtggttcctggcgctgagtgtcgacgcaacggcctcgccgactcccagggcttcctggccggccgcgagcgcttcggcttccgactcgacgatgaagtcatcaccttggccgtcgcctggcggaacctcgaccagcacggcttcttcgccttcgaaccgcaggtcataagtcttttcgacggacagtccgtaacgggcattgagcgcatcccagagctgagcttcatagttgcgcaggtcttgcagagatttctggtggctgagcatcgccatatcgacggcccgttgcagggtttcgtccaggacgttgaatcgcatgcgaagagaacgaatccgctcgaccacttccgcatccactacatgtctttcgatcatcgcttttcacctttgctgaatgttacgttgtagccattgtcggccaggtaggtcagggcgccttcgaaggaagttccgacgagatgcttgagctgcatttcgcgttgcgcggcgatccagaatgccgttccggagaactctgcgtggccttccgacaataccttgccatcaggcccgtcgatccgaacgtgaacggaagatagcttcagtaccatcaatgaatccctccactggcttgcgacggcatgctttcagcgcgagcggcttcacagtccgggcagggacaggcttggcggacgcgctccaactcgtcggcatccatgacatagagcttcccatcggaagtgtcgtgcgccatggcgatgttcgggaagtcggcagcgctcaggccggcgacagcgcggatttcgtcccagagcgccacatgctcggcattcaggcgagctgcgagcgcttcgtgctctttcgctacacgagccatgaactcgtccatccggaatgcgaattccgcatcgatggatcgggccgaggccatggagttgaggcgaatcggttctttcttcatggtaattctcttttggttggcggttgttcgctgctcaggcctattacagtctgagcagcatgatgaagatgaacgcaaggaacgcaaacggcacaagtatgccggacatcagctttgacaggcgctgcatctcagcgtatttctcggttgacattccgtgctgcgccgcctcagctgcgaagcgggctttcgcctcgataacttccgggcgcagcgacaggacatattctaaggcctcttcccgcgctttttcggcctcgaccgacctagggtcgcgggccgagacttcgctgtgccctggcctcgcgggatgggcctgcagcgatggaggaagttcggcggccacgactccatagtcggcgcaggcccaagcgatcccgatgaggatcgcgaggatggattggacgattcgcagcataactttgtcgctagggaagctcatgatcaatcctccacagaccgaacgatttccaggttgcgcccggcattggtcccggcattgaaggcgcgccgaccgtcgctatcgtccaggcgcatgagcttggtaacatttgacttcttgtagccaggatcgccgaaatgttcgtgcaccgcagcttccttcaccacaaccagagacgttccggcagaagataccagctccatgcgcttcctggtgatggcctgaaggcgatagctgatttcctgggtcgcggccagcttgaattgcgcggcaaccttgacgttgaatcgtccgtatccttgagccttctgatactcccggcacagacgatcaaccgcttcgacaagggagttgaacatgttcaccgccagctcaacgtccgatttgtagcctttaaagcggacggcatgaccccagcgcttcgtagtcccgccgtttgcggcgtgccaagaagccttggcggtcgctcggtgatcgttgatgccaccggcgaaatccatgatgcagtcgttgtacgtcgccacggccaccgagaagaacttcatccagttcgggattgcggaatagtaacgagtcgcgatctgctcatcgaactcttcgcgaatctcgccggtcacttcgaagtcgtgaaggtcatatttgtccttcagcttcttcacacgctcggctgcaatggcggcttcgtgcgggctggaggagtcggccgccatggcagtcagtttgcggatgcggtctttcgccttctcgatggcttccggggtgaattcgttctggtcggtcatggtcggttccttttgtctgaagggtttcgcgtttcaatggagctattctgccttcattcagaatggaagtaaagcactttcttccactatttcggcatcgactggaagaaattccagatccaatcacctgctaccagcaagaggatgagggcggcaaagaacaagacagcggccgcgagctgtgcgcccggcttcagtttgggatggctgagcttgggctctacgggaacggccggagcgctagcgctgcaaccggcgtctcctgggccgtagccgatgccgcgttcacacgcctggagcgacaccagggatttaagatactcggtctgcttttgcgactcttcgtagatgccggcgacggcgaaccagagggcgaacactacggacgtacacacaacccaggcgccggtcagcaggagggccagcgggccgatgacgaagacggtagcagccaggacgattgcgccgccccagatgatgaagccggccagaccattagtgatgtcgacacagaactttttcattttcagattccttcggttacgggatggaggggatttgaaactctgcgccgccgagaacatcaatgacgacttcccagagcgtcggaacagaccactggtaacggtcgaagtcggtttcaggatcgacgcccagcgtcacataggaagtggcaggccatttatgaacactgcctttccgcatgagagtcgccacgcggccgtcaccgagcggattcgttctgtgcggaacgtacgcagacatcgaatattgctgcccggcgtcgataacaaatctttgcctctggcgcagacatacagagcccacaggattccagccgcgaccgccgcaagcctggcgagccgaagagtgttcataaccttcgtgagtcatttcgccgaggcaagccgagcgatcctcgtaatagttgatgttctccatcgatccaaccagtaccagagactcgaaatcgaatctatgatcgtggatggccgagtgattgaagcaaagccggcgcggcaactccgggtgccaaacatggaggcgccctgccgggagctggacttgaatgaaccccaggccgtgcagcgtgatcttgtccttcatcgggtcatggacggtgctcatggataatcctcagtagcagaaatgtatggtgagagttacgatggccaagccggtcgcccataggagggcgaaccaggccatggctttgatggttatgtagatcatccgaagaactttccggcacagatcggtccaatgcccatttcgatggatgcgtggttggtcaactcgcgaccgcagcaggagcattgaccagtcttccggccgtaggcgactgccgattccatcggcttttcaaacatcttcagaacgtcgtcatgctcagtgtcggtgcagtcgcgactcttgatgaatttgccattggtgatccggccgaggtagatgtcgcccaagacgtacaagctaccggcgttccggctgtgagcgctagcctctttcacaataacgatgagcggctcctcgccttcgccagccaggcggattttcgggcgcttgatgccagattctttcgccttctcaaacgccttctcgatgccggaaatgtccagagtcggtgcagcagcttcctgcgcggccactttctcgcgatatttggcgaggttttcgatggcgcgcttcgcagcagcgatctgattttctgtcaaggagccgtatttatacaacgactcctgaaggctctgagcgaagctgaaggaatttccagtccaccactcgacgatgtccgggtgcgcagcttcgaaggctttaattttgaggtcgcgctcttgcgcagcgctacatattttctcgatgcgcttttctgccgccttagcacgactcttggcgcgctgctccgggctggttttgtactctttgtatccaacaccgccgcaggcgaagcaggcgcgaccataagacgaagggccacggtacaggccggtgcctgcgcatttggtgcacttgtcgcgatacagcttcacttccttccgggaattcgggcgagcgcccatggacgcgtcttccagggtcttcggcgcttcgttgttgatcgctacggtagcgaagtcgtcacccaggtcttcgaagccggtgaacagattctctgctgcgttcatatcgattctcctgtttggaaagttcgtttcgatgggttgactatacgccagaaatggaaaacggtagcactttcgcactaccgttcgtcggatcgcagagggtcaggctacacggatcaactgcgacatgactgccaggttccgctcggcgacgccgatgatgacgttggttccgatgatgaacttccaagggtcttccctgttcttgtcgtagaacggatttctgaacagggtccgccatgtctcttcagtgaagaacgttttatggtccaggtcttggtgggcgatgttggagttgtagaatggaacaacgacattgagcgtcgcgccgactgccatggcccgctgcaggtctttcaccaaatcgatgacctgggctccggtgagatgttcgaagaagtgaaatgcgtagaccgccgtcaattcgccgtcttcatacggcactcggccgctggcgccgtcccagttcggccagtcgagcgattcgacgccgggaatcggcgaattgcctgcgcccaggtttactgcgcggcggtgatccggctcgatcaactgagcgatgtcgcgcttcatgccgagtttgaacaggttttgaatatccatttggttctccaggttgctgttagtaaatgtcgctgttgatcttgaatccatgctcagcgccgtcgttgtggtcgtactcagcatagctgtcgcagtagtcattcaaatgctgaatgatgccaagaacgtcgttcgcggccttttgccgtttcgcggcgatggtcttggcgatgctgtcgccgacttccagggtttcggccgtccggcgatggatcagcaggcgactccaaagatagagccggacgcgacgaatgatgtcgcgatggcgctccagtcgtccgtgcaactcttcaatttcgtgctcgcgagattttaatactcgtcgaagctgctgaacttctaattccaaatcggccttagtagccatgttcacctcaaaaaggaaaatcgtctgggactccaggaagctcgacgactattgttgagcctgatcgatctagaatgcatccgaccgagccagccctgtggggatagggtctacacgaactataacaggtgacttccatgactattcgccaggtcgatcctccacaccatctacaaattggcggtcgcttcgacttcagttttcgttcgtccaagacggcgcgtctgtcgcaggaaaggcagcgcgccttaaccgacgtaaccatgggtatagtcgatcattcggatgaggccatcatcctctgattccctcgacttcagaccgcccaaagagtccgactggccgttgcatttcgcatcgatatccatcgaagacaagaatcctgccgatactacggtgatatcaactttgtcgccggccttcttgaagtcttcgcactcagcatcgagggccacaaccgcactcgcagccatgttcacatgacttatgaggtcggggaagatcacaggaacttcacgcgacatgccacggaccgtcatcttcagtactacatacttcatactcactatcccttttgtatgtgaggaaagaatttgctgttttccggatggtggaagcgctcggccgcaggctgtctttcttccggacattgaatcgtcgaaggcgggaaaaccgcgccggcgataatcgccgcgaggagtgcagcggatgtcgacatccagagggcggtttccaggctcacccgaacttccggacggcgcggcttcattcgctccaccctcttcccggttcataggatggtagactgccgccgcgaacccagtcgtcccacatgtggttcagaccagtcggtggctggggcggcggactgtagaatccgggagtctcagtgctgctcaggaaataaggtgtgcaaacggcctggacggccagttggtgccgctcccacatcttatcaatcgctcttagcatgacgtcttcgcactgaatcttactgtcgaaccgtctgccagtatggtccggtatctggacacatccgtctccagtgcaaaggaaagcagtagcaatccatacggtgatactcgccatttcgtcacctctttagttgatgagcagagtctattccatctgctcgccaggagtaaagcgcttttcgtcgggataaatgccgatgatgtctgcgtcgagcatccaaatgtccacggacggatcgtcgctgctgatttgatataggttgtacagctcccgtccgccgacagcacgctcgcctcgcggctcaaccgccagaaccttgccgtggccttctccgtgctcgtccaggtatatgacgtgatcaccgacttcatagctttctttcgtgacgaggcgtgaacgcgagttgttctgcgattcaaccacccaggaatccagcacgccgcctttcatgtcgcggaacaatcttgccgatttgtcgcaatcgaacacgcccagaacttcgccgtctttcaacacgatatgtacgataggaagaagagtattcatgtttaatctccattgactgataattagagtctaatctgccgaaaagttcccgtaaagaattatttctcagaactgattagttgtaactgttaatctgatgtatgtgtttgaatctcttttgaacgtttgatgtttcccctataataagcgcacacagccaacaaccacgtggaactacaatgtttaaactttcctggatattcgggcgcaaaaaggatagtgctgcctgttctgaatcggcgccggagaaagtcgcacaaatccctcaacacgatccgctcgaccctatgattaagctgggcagaattcgcggctggaacgtcgagccggagaaagccccggtcatccgtagcgtgaaggattttctggaaccgggcctatccgtcgcaatggacagcgcgtatggtgacggaccgactccggccgcgaaggttgctgcgggcggccagaatccctatgtcgtcccgaccatgctgcaggattggtacaactcccaaggtttcatcggacaccaagcttgcgccatcatttcccagcactggttggtagacaaggcttgttccatgtccggcgaagacgccgcacggaacggatgggaactcaagtcggacggccggaagctatccgatgaacaaagcgcgctgatcgcccggcgcgacatggagttccgcgtcaaagacaaccttgtcgagctgaaccgattcaaaaacgtcttcggcgttcgtatcgcactgttcgtcgtggagtccgacgatccggactactatgagaaaccgttcaatccggatggaatcacgcccggctcctacaagggaatctcccaggtcgatccatattgggcgatgccgcagcttacttctgcctcgacggccgatccgtctgccgaacatttctatgagccggatttctggatcatcagcggtaaaaaatatcaccgcagtcacctggtcgtcgttcgtggaccgcagccgccagatatcctgaagcccacatatctattcggcggcatcccgctcacccagagaatctatgagcgcgtgtatgcagcggaacggacggcgaacgaagccccgctgcttgccatgtcgaagcgaaccagcaccattcacgttgacgtggaaaaggccatcgcgaatgaagacgctttcaatgctcgcctggcgttctggatcgccaaccgtgataaccacggcgtgaaagttctgggaattgacgaaggcatggagcagttcgacacgaacctggccgacttcgacagcatcattatgaaccaatatcagctggtcgcggccatcgccaagactccagccacgaagctcctcggcacttctccaaaaggattcaacgccactggtgagcacgaaacgatttcttatcacgaagaactggaatccattcaagagcacatattcgacccacttctcgaacgtcactatttgcttctggcgaagtcggaagaaatcgatgtgcagctggaaatcgtctggaatcctgtagactccacgtccagccagcaacaagccgaattgaacaacaagaaagccgctaccgacgaaatctacatcaactctggcgttgtgtctccggatgaagttcgcgagcgtctgcgcgacgatccgcgttccggctacaaccgactcaccgacgatcaggcagaaaccgaaccgggcatgtctccggaaaacctggccgaattcgagaaggccggtgcacagtcgacaaaggcgaaaggcgaagccgagcgagccgaagcccaggcgggcgccgtagagggcgcaggcggcccggttcccgccgctccacgcgggactaagcctctcgcgaaagcggccgaggaaggggccagcgaggccgctgaaccgccgtcgcgaccggaccccaaggccgagctgcggaacttgttggtcgatcttttgtcgaagctccaagacctggacgacattaaggcgccggacggcgtagacatagagcacaatgatgcgcctggcttaaagcgcacgtccaaacctggcgtgtctggcatggagccttcagtgttttcgtccaaccgcatcgtcgggcctcgtgatcattcggaactccagagaatcaaggtgaatggaataaccaccttgatcgaaaatccgcgcggaagcattcgacaaggaaaggatgggagttggcgagttcagatgaaacaccactacgggttcatcaagggaacgaaaggcgctgatggggatgaagtcgattgcttcgtcggtccgaatctgggatccaaacgggtcttcgtcgtcaaccaggtgaacaaggaaggtcagtttgacgagcacaagtgcatgctcggcttcaacaacatcaacgatgcgaagtccggatatctgtcctgcttccgtccgggctgggatggtctcggctccatccatgaagttgacctgcccgctttccgtcgctggctggcgaacggcgacaccaccaaaccattcgggggcgagtgatggcattcaaggcctccaaaaagcgcgagcgccgggcacctcttccagtcggaagagggaagcccataattccatcggcaggaatcgaggcctggtatcgaaagcagatgaaggatatgtccaagctcatgatctccgactatcgaaacgagattgagaaggcactgtcccagcctgcggccgaacggttcttcgccagagacgaatccgttaacgtcctgttcaagatgacccttcgaagcctacagcagcgatggagccgcatttttgaaggtttcgcggccaagatcgccccagagttcgtcaaccggaccgaagaagccgccactgccgcgacccttcacagcttgtcggtggccggcgtcgatcagccacgagctgcgtataatgagagcgtcaggaacaccctggaggccgcaaccacttacaatcatactctcatcaccaagatccaagaggaagtccacgagaagatttacacatcagtaatgctgtctctgacttccccgaatccggaagagcaaggaacttccggcataactaacgcacttcgcaaagtcgggaagttttctgaagatcgaatcgaactcatcgcaagagatcaaacaagcaagctttacagttctctgagcgatgagagaatggcggaaaatggagtcgaggagttcgagtggctacactcttctgccggcaagactcctcgccacacccacctggagaaagatgggaagaggttcaagctgaatgaccccagactttgggagggtccgaaagcagaccaggggccgccaggatgggcgattaactgtagatgcagaaagataccagtcatttgacatcgataggagcgctatatgccgttagttcatggcacttccaatgaggctcgttctgaaaacatcaagcgggaaatcgaagccggtaaagacccaaaacaggctgcggccatcgcttattccatccagcgcagtgagaaagggaagacggcgaaagattgttcgcctaagctcgtcgccgatcttcgcgccctggtggacgctctgtcgaggctcgtgaaatgaaccgcaagacgtgccggcgccgactcgtggtcgatgtaatcagggccaatattcacggcggattcttcagcctgaagtttgccgccatcgatttggcaatcatcggcttcgccatcttgatggcttttggccgataatgctgagaaaatctggattctgactaaaaattctagtccggatagccgcaaattaccgtttacggaaaatagcagtaatttggaaatcctactgccgcgaggctttaacagagccagttcctaatttccgatttagccgcatgcttcaaaagtatatagcctgggaaattagaagtaacgttccaatagaattcatctataagtaacgctataatataacgtcaatctatatactctagacgtattgaaattcaatttttaatcggtaaattggtaatttgaattagtttaggagttgaaagcctcgcggcagtaggcttagacaaatcccgtcaagtttccgagaccaaattaccggattttcgcggctgaggaaactggtaattagatcacaatacaaattataatgtaagttaacagtcgcggctacatctaattattgttccgcttatttacccttagatgtactgcgtatataatacagccatagtccacgactcttcgaattaacgatggcaaagtcgaaaagaaaaattgacgaaaatggatatatgaccatagagggctgcccgatcagctcttatggcgttttccaatattctgctggtcaactcggtcttccgggcgatccgacgcggattgtcaacgtatatcgcccggagtctgccgtcagcgatccggagtacatcgaatctctgaagaatctcccgttgatcgacgagcatgagatgctgtcgggattcgacgatgatgacgatagcgtggcccccgaagacaaaggggtggagggcatcatcacatccaacgcttactacgaagccccatgggcacgcggcgatatccgcatctattcccgcaacatgcagaatcagctggaaaggggcaaagaagacctgtccctaggctatagttgccgctacactgagcaacccggcatctggaacggaacgccttatgaagtcgtccaggacaagatgcgcggcaaccacattgccctggtaaaagagggtcgtgtgccgggggccagagtattggatggtctgtgttttgaccatctcagttttgatttcagaccatccgatgagggtaatgaaatgagtctcaagaaagccaagcggaagccccctgtccagcgcgtagggcaagctgctgactcggcggtcgaagagttgcgcgccctgtggccgaagctatctgcgtctgtccagaagttcctgggcgaagaagagcaggagccggagcatcaggaaggcgcagctccggccgaaccgaccgacagcgagcacctgaccgagcatccgactctggaaggtgctcagaaggatgacgaagagcaggaagaggagccttccgttgtcgatccggccgtggccgccgtcgagccggagcatcaagaaagcgccgcatccgaaatgtccggtgaaggcgaagtcgccgaactgatctctcaggtcaaagccattctggctcgactggagggcacggtagccgaaggggcggacgaagagcatggcgaaggtcaagatgtcgtcgagggcttggaagagcagagcagcctcagcggcgcgcaaaccgccagcgacgatggtggtgagggcaaggataacagcgaggaacttcctgaaatggcacagaagaacgcgcaagatgctgcaattcgcggtctctatcgcgacattgctgctaaagatcgcctctacaagcgtcttagctccgtggttggtgcgttcgatcaccgagctatggactcggctgaagtcgctgtttacggcgtgaaaaagctgaacatcagctgtgcgaagggccaggaagctctggcgctcgacatgtacctgaaaggcgtcgaagcctcgcgcggcgcggccagccgtcaatcgaaagcccaggattcggccggttctgctccgcagtgtgccgagctggacagctacctgaagggggagtaactcatgttccagaaacaagtttaccgccagtacactcctggttttccgggcgatctgatcgaggacggcccgaagcgggcgcggccgggtcgaatcatggctctgtcggccgtaactccggctgccaccgccaccggccccaaccgcatcagtcgcgctttcggttatgccggtgacgtcagcgccctcggcgaaggtcagccgaagaccatcgcggctcgtgcttctgaagtcgtgatcggcggcgccaacttctttggcgtcctcggtcatccgaagcactatgctctgttcggttcggccggagactccctggctcccagctatgatctgcccgatggcgccgaaggcgagttcttcgatatggccaccggcctggtcgtcgaaattttcaacggcgccgcaaccgccctggacctggactatggtgacctggtcgcctatgtccccaacaacctggctaccgccgacaacgcgcttggcctgccggccggcgccctggttggcttcaaggctggctccatgccgaccggcttggtccagattcccaacgcacgcatcgttaacgccatcagtctgccggcccagtcggcggggaatctggttgctggcgttaccatcgtccagctcacgcagtaaggaggcgtcatgagccagatcagcaagacccattcgcgcctcgcaggccgcaatgcgaaacctttcgacctgaaaaacatcaccaatgacgccgtggcgtctctgcgccgcatcggcctggtattcgatcacgccgtcgtccaggaccagatcaaggccttggcgaaggccggcgcgttccgctccggctcggccatggacagcaacttcaccgccccggtgaccacgccgtccatcccgactcccatccagttcctgcagacctggttgccaggcttcgtgaaggtcatgaccgctgcacggaagatcgacgaaatcatcggcatcgataccgttggctcctgggaagatcaagaaatcgtccagggcatcgtggagccggccggcactgcggtggaatacggcgaccataccaacatcccgctgaccagctggaacgccaacttcgaacgccgcaccatcgttcgtggcgagctgggtatgatggtgggtaccctggaagagggtcgcgcctcggccatccgtctgaacagcgccgaaaccaagcgccaacaggcggccatcggtctggaaatcttccgcaacgccatcggtttctacggctggcagagcggcctgggcaaccgcacctatggtttcctgaacgatcccaacctgccggcattccagaccccgccgagccagggctggtccactgccgactgggcaggcatcatcggcgacatccgcgaggccgttcgccagctgcgtattcagagccaagatcagatcgatccgaaggcggaaaagatcaccctggccctggccaccagcaaggtggactacctgtcggtaaccacgccttacggcatttcggtttcggactggatcgaacagacctatccgaaaatgcggatcgtgtcggctccggaattgtccggcgtccagatgaaaaaccaagagccggaagatgctctggtgctcttcgtcgaagacgtgaacgcggccgtcgatggcagcaccgatggcggcagcgtgttcagccagctggtacagagcaagttcatcaccctgggtgtcgaaaagcgggcgaagtcgtacgtggaagacttctccaacggcaccgccggtgcgctgtgcaagcgtccgtgggctgtggtgcgctacctcggcatctaacagatgcctattcaccaaaggccgggcttccggcctttgttcactctgactctaactcggttgtaggggccggttagggcataattactaggactacgccaatgactgtttatatcgtttcctccatgactcaatcggtgtcttacaatgcgtatgacacctctgatccgtccaatcctcgcctccagcgaaagattctgattcgcggccgcgcaggcatcgcatccgaaacttccggcttcggcgacatgatttccgacgaggccggacgtccgatctggaccccacagggcgattgtactgccgtgagcgattcggatttcgagctgcttcaggccaataagattttcatgcgtcacatggagaagggttatctgcgagtcgtgaagaccgacatcaccagtgaccaccagcggatttccaaagagactcgcaccatggagcgcgatggattccagcctctggatgctactcgcctgcagcagaaaatcaaggtgaccacagccagcgcttcccaggaacaagagttccggatttaaccgagggtttcggtatggtgattttcgacgaacataagtttcgcacgctgtttccggagtttgctgatccagccgcttatccggacgtgcgcctgcagatgtacttcgacattgcgtgcgaattcatttctgatcgcgattcgccataccggattctcaatggtaaagccctggaagcctgtctgtatcttctgaccgcccacctcctgtcgctgtccacgatgcaagttcagggcgcggctggaggtggcgtcactgccggtgggacccagggcggtttcatcaccagcgctactgtcggcgaggtcagcgtggccaagctcgcgcccccggccaagaatggttggcagtggtggctttccgggacgccttatggtcaagagttgtgggcgctcctcagcgtcaaagcggtgggcggattctacatcggcggtcttccagagcgccgaggcttccggaaggttggagggacgttctggtgatccctggtgcgaatcttctgcgaatggccttcggggtcatcggtactcaaattgtgaaatatcgcaagtttgagcagcgagtgaagaatgatcaagctcagtacgtttccatgttcgaggagcctttcgacctggcagcgtctgttcagcgagtccgacgcgatcagtatgtccagtttaatctggagttccaacggaattacgttatgatcttcgccaactttgagatggttgacttggatcgcgatgtggccggtgaccagttcctctggaccggaagagtctttcagctggagtctcaaggctcctggttttatcaggacggctggggagtttgcctggccgtggatatcggtgcggccaagctcactgatgacgggaaaccgactttctaggtgatgtatgtttgacggcgaactgatagcgaaactggttgtcgagttgaatgcggcgatgacatctgctcaagaggctttgcagttcccggattttgaagtcgtccagaaagctcagccgacccaacagggaacgtcaaccaggccgaccatctttttccagaaactgtttgacattcctcgcggctggcctgccaccgattggcacctggacaacacggcccgcaaatatgtagaaataactcgacagcatgtagagacgactttccagatcagttcccttcattggcagaatcctgaaataactcacgtggttacggcttctgatatcgccaactatgtgagggcttatttccaagctcgatccacgattgagcgcgtaaaggaactggacttcctcattcttcgcgtgtctcaaatttccaacgaagcattcgagaacgacaatcaccagttcgaattccacccaagttttgacatggttgtaacttacaaccaatatattcgcctgtacgaaaacgcagcatattcggccgatggggtattaataggcatatgagtctgaggcgcgattcagagctaatcgccgcgcacctccagatgttaagagccatgcgcggcaggtccgtttcagccggatggtattccacggctcgatatcctgacaaggcaggcggatcggtcggaatacaagtcgcgagaatcgcacgtctcaatgagtacggcggaactatcgaccatccgggcgggaccaggtatattagggacgccattgttcggggtcggtttgttggcgttcggttcgtcagaaacgactttccgggagaaaccgaggtaactaagcctcacagaattaccatcccggctagaccgtttatgcgatatgcttggaacttgttttccgcagatcgcgccgcaatccagaaccggatagccatgaggctggccagaggacagatcactccagatcaagctcttgcccagatcggcctggcgttggaaggatacatagccagaagcatcaggaccgggccatgggtggctaactcagcatctacggtcaggagaaagggattcaacagaccgctggtcgatacggcgcacatgcttcaatcgattagcagcagagtaacataaccaggagatcatccagtgatcagtcagagccgttatatccggatcatttcgggcgtaggcgcaggcgctccggtcgcaggccgaaagctgattctgcgcgtcatgactaccaacaacgtcatcccgcccggaatcgtcatcgagttcgacaacgccaacgcagtcatgtcatacttcggcgcgcagtcggaagagtatcagcgggctgcggcttatttcaaattcatcagtaaaagcgtgaattcgccgtccagcatcagcttcgctcgctgggtaaacaccgccatcgcgccgatggttgttggtgacaatctgccgaagaccatcgccgatttcgccggcttctcagcaggggttctgaccatcatggtcggcgcggccgaacagaacatcaccgccatcgatacgtccgcagcgacttctatggacaacgtggcgtcgatcatccagaccgaaatccgcaagaacgccgacccgcagctggcccaggctaccgttacctggaatcagaacaccaaccagttcaccttggtcggcgccaccatcggcaccggcgtcctggctgtggcgaaatctgccgatccccaggacatgtccactgccctcggctggtccacctccaacgtcgtcaacgtcgccggccaggctgccgatcttcccgacgcggccgttgccaagagcaccaatgtcagcaacaacttcggttcgttcctgttcgccggtgcgccgctcgacaatgaccagatcaaggccgtgtcggcctggaacgcggctcagaacaaccagttcatctacacggtcgcaacttccctggcgaacctcggcactcttttcaccttggtgaatggaaacgccgggaccgccctgaacgtgctgtcggcgactgctgccaacgacttcgtggagcagtgccccagcgagattctggccgccaccaactacgatgagccgggcgcttcgcaaaactacatgtactaccaattccctggccgcaacatcaccgtttccgacgataccgttgcgaacaccgtcgacaagagccggggcaactacatcggcgtcacccaggccaatggccagcagctcgcgttctaccagcgcggcattctgtgcggcggtccgaccgatgctgtggacatgaacgtctatgccaacgaaatctggctgaagtcggctatcgctcaagcgctcctggacttgttcctgaacgtcaatgcggttccggcgagcagcactggcgaggcgatgaccctggcggtgctgcagccggttctggacaaggcgaccgccaacggcacgttcacctacggcaaggaaatcagcgccgtccagcagcagtacatcacccaagtcaccggtgatcgccgcgcctggcgtcaagtccaaaccctgggttactggatcaacatcaccttctccagctataccaacagcaacacaggcttgaccgagtggaaggccaactacacgctgatctattcgaagggcgatgccatccgcttcgtcgaaggatcggatgtgatgatctaatggtttgcggcggactcgatccgccgcgaccttccataaatggagtgaggaataagcaatgatcaacatttctgcgttcggctcgatctgccagttcacggcaagcagaactttcccgaacggattcaccgtcaccgagtttgccgacgatgcggaccccatcgacagcccgccgttcactgcggccgataccggcgtcggcctcaacggtgacatggtagtctggaaccgggcgaacatcctggaagtcgtcgttaacgtcattccgaataccgagggcgagcgcaacctggcagtcctgctggatgccaaccgcaccggaaaggacaagtcgggcgctcgtgatgtcgtcggcctggtcgtggcgatgccggacggcagcaaaatcacctgcaccaacggcaccccaatcgacggcgttctgatcaacgcggtggcaagcgtcggccgtctgaagaccaagccgtatcggttccgatttgaaaaagtgatcaaagccggtactagctgatgaagaaaattccgctgacagcagtccccaatcaagcgatctcatttaacgccggtagcagctattggaagattcgcctgtaccagaacatggacatgatgaatgccgatatcagccgcgacggcgtgatcgtttgccatggggttcgctgcttcggcgggattcctcttctccagtacagccatcagtaccgacctgactatggcaatttcgtcttcgaccgcgacgccgattggacattgttcggcgacggcatcaacctgttctatctggacggcgccgaattcgccgagtatcaggcgcttgccacgaggaaagaatgagcacatcaacgatcagaaccgggacgaacaacgatatccttttggacgacaatggaaacatggttatcctcagggatgtcgaagcgtgcgcccaggacgttcgggcggcgatgctcatgcgcaccggcgaaaacattttcgatgtgaactccggcgtgggatatttcgaatacatcttctcgccgcagaaaagctatgatgacgctcgcaaatccatcgcggatgcaattttatcctcgccggatgtgaccggcatcgagcagcttgacatcgacataaccggggaagtcttcggcgtcgatgcgaaagtcatcaccatccacgggcctgttaccacaggagtttgaaatgagtaccatccgcatccaatacgccaacggcacccaactgttcctggacggcaaaaatccgccgcccctggacccgctgccctcgtttaacccgtctgtcgaagatctggaaggcctggaccgcgaaaagaacatcgacaagggcgactcctcgccggccggtcttcccgttcccccggtaaacgtcgattccaatgtcgacaacggcggaaccatcccggctccggtatcgaccgacgctgctgcggccgaatcggccccagaaggcgcccaggaagctcctgcagcaggccaaggcgacgagaaaggcgccgaggaagccccgactacagccccggtagaaaaggccgaggaaacggcctcgccggccgctgaagaggaaaccccggctcccgccaaggccacctctcgcaaaaccaccagcaagtaaggactcgacatgatcaacgtcagcggcttcggcacaggaattgtaatagtttcagcctcatcgttcccgatggggttttccttgtcgaagttcgctgatgatgagagtccgatatcctccaaagagctggagccgttcggatatgagatgctttatgacggcggcctattcgcctttgacaaggctgctcctctggaagtatctgtatccgtcatcgcagggagcgaggatgatattaaccttcgcatccttctcaattccaaaaagggatcattcagatttcttccgggcagcatcccggatatgacgactctcgtggccactcttcctgatggcggccgcaccgttctgtccaatgggactatcatcaagggtccggccatcgacaccatacagaacaccggacgacgcaaaggcaacacgtacacttttgttttcggtagctatcttggcgcccagactgcgcgtcaagctatttctaacgttatccaatcggtgctggaggtggtctgatgttggggattttcaccagcctcctaagttcgcgatctttttcgattgtggaccaaaacacaaaccagctagttgctgcggatttgaggataagccgggtcaacacccggttttcttctgtagggcaacgccacatgctggaagatggtacgaccaagatggattccagaacgatccaccctatggaaatcatcgtcgaagtattttgcccttcaattgatgtcgtcgatcagatcaatcaattgctcctggatcgcgacacactgtacaaagtcatcactcgcggcatggtattcgaacggatgatgtgtaccagcgaagcgctcaatcagactccggatatgatatcggcgactcctgcgcggctgacattctcccaagttctcgtccagaatcccaagcctataatgttcagaaatgcaggggactcttctatgatcgaccgagggctggccctagctgaagacgtggttggctcggccggcgatctgttcgactacgcagtaaacggcgtccagaacgccgcagacttgttctgaggtgccaattgaactctttcctcaagtctattctcaacacgcctactctcaccatacgcaatgatgttaccaaacttcctgtctggaagagtcttcaagtcaagaaagtggaaatttactcgccggcttccgtagtgtcgaaacctctggcgacgaaagaccagacggaagctcaagtgtacaccgaagctctggacattgatgtgaagaatggaaagatcatccaaccggtgcgactccgcatcaatgctatctgtccggacctgtccaccgttgaaagtatcatgaacgctttcaatgataacacctcgactttcgctatcacttctaagtcgatattggccgataaaatggccatcatggcgctcgatgtagatcagtctccagacatgttgaacgcggctgagatcaatatggaattcgagcaggttgagcctccagtattgaatgaattcgatcctgcgttccctcaagatagtccgacttatggggtacagattcaatctctttctgatgctaatttgctggatttgggcgccatcggcgattcgatatcttcggccgcaaaatcgctatataatcgcgtgaccagctacttctgaggatgtatcatgcttgaaatcaatcttcccgatggccgtcaaactcgcgtacaaatcgaggcgtggtcggcattggatggctgggacctccagcgccgtttcgtcgaattcgctgtcagccaagattcagacttccgccgctctttcaccatggaaatcctgggctatgcgaaagtgctgcttggcgacgatgacgccggcattccgctgaccaccgcggcagtcatcaacaaccacctcggccactggaagaacgtggaactggttttcaactctgttctcaagcacaatggcatcgacccggccacgcacgccgaccggccggactattgggaacaagtcggatcgcagatggccatcgcatttctggccgaggcgtccaagctcattggtccagcaatgaagatcgccgaaggactcgccaacaagccggagtgattcatgtctagtgatttggatgaattcatacttcggtatgaggctgatactgccagagccgagcgcaatctggagcgcctccagaaccagatcaggcgcgtgaacagcgcatcgacgagtggccttcaggatttgcgccacttcgcagacggcgcggccaccgaactcggcagagtcgttccgcagattgattctgtgacgagcgcaattcgcggaatgaacgcgcaactggcaataggcgccactggcgtggccctggtcgcggccggcgtcaaggcgttcatgaacaccagggaccagtacaatcagcagcgcatccaggcgatggacatcggcatcgccccggcacgcttggaagagtaccagagaaaattcgttcgccagtccggtggaaccatcagccgcgagcagggcgcggagatgaccaaaaatctggcagacactttccggcgtgcttatcgcgatatcgggcgagtcggcccggaagcgcgaattctgcgtatggccggcgtcgatgtcgggagcttccaaaagggcatgcggccgctcaacgacatcatcaccgatctggccacgaaaatggccaagctgaagccggacgaaatttctgcctacgctgatgcccttggcgtctcgcgagattacctgagcaccctggcgaagatcggcccggccatgggaaaagtcactgagatgacgactgcggaactccagtccagggtccagggcgagtccaacatccagaaattcaacgatgccctggcgaatctcaaccagacgttcactaccctggaaaaccgagtcggcgaaaagctcgcgcctgcgttcaccaagctgatcgaaatcatcgacaagatagtccaggctattcccaatgaagtggaaagcttcgcgaaggacaccaaatcccgttgggaagatggagtgctcgggaaggcgaccgttggcagtgatatcctatccctcctcagccccggcgccctgctcggtcgcctggcagcgtgggggactcgtcgcggcatggaagaatcagggctcatcgacaaggacaaggttcccggcgctcaaaccagcgaagacctggccaagaaacaagaagaccaggacaaggctactaagtccatgaaagagctagagaagctggctgaccagaccacgaagtctaccaatgattttgcggtggcgatcaacatgttcagtggcgcggtatcgtcgttcgcgaatgccgttgacgagcgccaagcttgggcagcctgggcgggggaaattggtcgggcggtcggcatgggaagcaccgcgccgacttcgcgggccaccggcgtctatccgcacgcgatctatgatcagtcgaagagtggcgcggccggacaagtcttcggcgagccaatcggcgcccagtctcttcgcaatcgcatgttctcgccgcagcgcaaggcagagccggtcaccgttccatcgtacatcaacgatatcatcaaagatgcttcgaagatgtacaacattcctgagctggacatcaagaaactcatatacaccgaaagccgattcaacgccagggccaccagcgaagccggagcgaaaggcctcatgcaactgatgccggaaatcgccaaggcgtatggtatcactgacgtatatgaccctcgccagaacatcctcggcggaacgcgcctactgcgtgaaaacctagatcgagcaaatggcgacatgcggttggccttgacatactatcatggcggactcgatccgaagaactggggcccaaggactcgcgcatatccgggtttggtaatgagcgctccaatcgagctgatggaagaggctcagcgcaagcagaaggctgcggccatgaccgtcgccaacgagacgttcgccccggaaggcggcgacatggacattcgtccctatgatggcgggcgactggaaaccccagaccagggcaagaaggaagatgagcgccgcgaagcccgtcgatatgacgacagggttgtgcgaccggaaattcgcatcatcgaccgcatgccagaccgcagcgacggcgaaatcctcaagatgtctaggcgtcaagaggccgaccgggcagactctggattccggaagttcccgaatcaggttcgcggcgagaccaagcagaacatccaggcccaactcactgccggagccatcgcgcaagtgatcggcgttaaccccaaccagatcatgcgccgcgaaatcagccgttctgacttgctattcggatacaaccaagccatcctgggcaagcagcaggagatcaaggccgccgcgaccgaagccaacaacgtattcctgtctccagccaagctcgccgaagccactgccaaggtgaacgccgcatcgcgagaaatggatattctcaggacgtacggcgagcaacttctgaagagcgctccagagcgcggccaggagctgaccatcggtcgaatcgatatgttggtcaacgttaccggcgcgaattctccggaagaggctcgcgagatattcagcaagcagactgcagaccagctgactacggcaatccaagatgcccaaaacgattccgcaactaagatactctactgatgaaaaagagaattctgcgagtaacattcaacatgccttatggacccgaagtcatccgagaggatttggatgttcgggtccggatcatgaaggctgcgttgcggattcagaaccgggcgactatggaaattttcggcctaaccactcagctgcgtgagtctcttctgtcacagttcaccgcgtggaagcaccggcaacgtcaagtcggcagggaagatgaattgatgatcaaagtgtcggtggaagccggctactctgaccaggggcgcgagcaagtttccagagtctttgtcggcgaagtggccattgtcgatatcatttcgccgccaccggacattggaatccgcatccagtgctacaccaggcaaatcgacaggacgaagaccattcgaaatatgccgcccgccaacacgacgttcgtcaagttcgtcgagtggggcgcgaacgaaatgggattgaacttcatctgcgataccagttacaacgatcaagttctgaagaatccgggccggtctatcactgtcgcgtcggcaatcctggcgtcgattcaggatatgtacatgccggacgtggccgcgttcgttgatgatgacatcttgatcgtgaaggatcgcgataaagtcattcgccctgatgaggtgaccaacgtcaattcgttcgttggaattccatcttggtctgaatggggcgttgaattccagtgtctgtttgagccatcgattcgcgtggctggaggcgtggcggtcgaatcgctcatgaacccgagcgtcaatggcaactatgtaatcactgctctggaatacgatttggccagtcgggatcggccgttctatatcaaagtcatggggagcccagcagcataatggccagggaaatcaaaccgttcaacatgttcggcgttcactatacttcgcggcaattctctgctgtcgatgggctcagcatgatgtcggaaattcagagtgtgccgccagaagaactgctcaagggaaccagtgtattggcgcatccggaagatcatccggaaggcatctggcttcccttgaccgctgcgaacatcaatctttatgtagttgatcgggcgaaagtaatagctcccgtacaagttcttgcacttctgtccgaagtggtaattgactggaactttggtttcctcaaagactggaccggagtcaagattccatccagatttgtcgaagatatcaaaagcgtgaagacggcacattcgccttctgtagttgcgagtttggtagcgaacggctcagcctctatgcgcgagttggaagagtattattcgactcaagatgcatttaagatgatagacatcatgacggcgaagagcgtgaacgaggccttggcgtcagaggcatcgcacaacagaatcaaaaagggataattcctaaccgggcctgggaaggctatactagacctgccaaatcagaggctttcccatgtccaatatttctctaacatcagcaaaagctcccgacagaacgcgactgatcgccgctcttgacgctcggtcgcgacgggatgctctagatttcgaagtaatgataccggctcaggttgttcaatatgaccggaccgagaatatcgcgacgattcaacctctcatcacctgggttgacacggaacacaatgccgtccaaaggcaccagctggtggatattcctgtaatttccatgggggctggcggcttccacataagtttcccgattcagcaaggtgacataggctggatttatgcggccgaccgcgacacgtctcagttcctggagtcgttgtcaatgtcgaagccgaacaccggccgcatccataagttcgagcacggcctgttcatcccggacgtattccgtcgatacaccatcaattccgaagattcggccgctatggtcatacaatcgacttctggagcgaccagaatttcgattcgcggcgataacatcaagataactgcgccgtcgaacgttactgtggatactccgcaggcgaacttcaccggcaatgtgactatcgctaacaccctggtcgtaaacggcatcaacgtgaacaaccacggccacctcgaaaacaacccgcctgatgcccggacgaaaggcggcatggttgcttaaggagattttcatggcaagttttgatttttctgatttaacagcgggggggggttgtaatggctaactacaactacatcgtcgatactggtgtgatagtcgcagataccgccgacgttctgagcgacgttgaggccgagttccgcgccgccctcggtgccaatatcaacttggccgcgagcactccgcagggatcgcttgtcgcggccgaggccatcgcccgttccagtgtcatgcggaatgaagcgcgaattgccaataccataaacccgaacgtttcattcggaacgttcctggacgcgatctgtgccttgatggggatcgagcgcggttctgatctgtcaaccttcggctatggagttcaagtcaccggccgcagccaaacccgcatttccaccgggtctagggtccagactccggccggcgcgatcttcacagtgatgagcgatgtcacgatccctgctggtggtgtcgcgaccatcgatatcaaatcgcaggagtatggcaacattcctctgccggtcgggaatctcatcatcatcgacggaacaattggatggtccggagcaaaagtcatcgcctccactcgcgtcgatccgggcagccgccaaatgagcgatgcagagttgaagaatgcccgcgttaatcgattggccatccaaggccgcaactcgactatggccatcaaggcgtatgtgagcgccgttccaaacgtcacgtcggtgaacgtaatcgagaacaacaccggcgccgttcaagtggtgaatggagtctcgtttacccttccgtatgctgtttgggtctgcgtcgccggaaacccggataaacaagcagtcgccgatgcgttgtgggccgcccataacggcggaactccatgggactatggtgcgacgaacaacggcgtcccggtggacggtccgaatggcgttcctgtgcgcgatccggcgtccggtcgaaagtatgtcgtgaagtggaccactccaattatgtacgatggatatgttaacgtaacagtccagcaaggttcctcctctgtagctccggaagccattcagaacgcagtggtcaattacgcccaggggaaagtggaaggggaagaggggctggtggtgggcgcgagcctgtcggcattcgaagtcgccggcgccatcgctcgcgaaattcccggcatctacatcaaactctgccaggtcgcgtgcgtcgcggctggctcgccggctccggctccgggcgatttcacttcggaatacgtcatgagcgcattcggccaggctaccatttccgttggtaacgttcgggtgactttcgtatgactctgcctgcgtacaattcggacatccaacaagctctgaaatggctccataaccaggcgcctggaatcaccggcctgatccagagaaaggcgcaatggtatgacagattcagccgccaattctgggccaactgggagcgcgacgttttccaattgaaaactgccaacccgttcggccttatggtttggtgcatcatcctcggcacgccttcgaaagggttcggcctttatccaaaaaacagttcttgggcattcggtcggctacgccagaacttcatctatagcggtacacaagttccgccaccggcagacgcatcgcctggcggcaacttctacggtggcggcaatgccgaaattctcaacttggacgaaatcaggaaagtgcttcagctaagatatgtagcgctgatttctaacggctcgattgcatatgtcaatcgcatgcttcgttacatattcaatgatgatgagccatgggacgaggcgaccggtctgtacttctatctcatggactcaaccggcgagaatggccctgtggagaacttggcgatatatcggaaagattgggaaggtatggtgctgttgtccagttcgcccagaacgaaccacgtgctgacatcgacccctgccagcgacgccgattggccgggagtcgatccggccgcgagcggtattccggtaacggtcgaaacggcgtccgctacggccccggacggctccgctacggtgtgcaagcttactaagccggccgggagtaccgcttacgtctccgcgccgatagatgggccgctggggtccggtagcactgtaacgttctcgttcttcgcgaaagccggctccacccgtttcattgcaattcagtcggctgccgatttccccagtcgagccgatgccgttttcgacctggattccgggaacgtaatcagcgatcagatgctggacagcagcgtggtaagcgcccgaatgattcgtctggaaaatggctggtggcgttgcgttctcacgaccaagaccgtcagctcttcgttccgcgctgcttacgtcgctccggcagaaaccaacttcagctggattgattcgaattccagcgcggcgattgacgtgcttatctggggcgctcagatcgaactgggtgatactccaactggatacttggaaactaccggggcgcccgtaaccatgaccgattatgttttgcagaccgcccagaccggaacagtcaagttcacacagccccttccgaccggagtagaagcgtattggactggagactggaaaggcgggactgcagcagaaccggccagattcgcagtcgggaatgggactcaggatacgtttactctgtcagaccccgcatacatcggcctacccaccagtggggcgttcaagctagaatacagggttggtccggcgcttaatctgtcgccgcaattgatcaacctcatgaatgaccgggcagttggtattatgccgacttgcgccggttgcgatgtcaaagtcattcaggagtaatgacgtgatcacacccgacctgatccccagtccgtttgccgctcagggcgataaagacccgattccacaaacctcctccactggcttcgcaaaccttcgcgacggctatacgccggactacgaaatcagcctggcgtcgaacaacccgcaggccaaagcggtcgagcggaaaattcaaaaccaactcttcttcatcgcgacccagaacgcacaggcgtggcagcgacaaatggcaccgccgtggtttcagggcatgcctggcggctacgaacagaatgcagaagtcgtgcgcgtcggaaatgacggcataatgcggcgttatcgttccatggtgaatgccaatgcgagcgaccctctcagcagcacgacttgggaagaacaacccgcatggtcggcgatgcgctccaacatcccgatgccggccggaggcccaggcctatcttctggcggagaagtcatcacgaccggccgcaacttcaacgacctgttaaatgggacgtgggagttcttctctgattcagtggttatcgcttctcagaatgcccccgtatatccggcttccgctggtgccgctgctggcatgttggaggcgaaatcttgggtgtccggagccaatacgttctgcgtccaacgctacactgatcgcgtcgggaacgtcgctgtgcgcgggcttaatgccggagcgtggaccaactggatgtatgcggtaaacgtcatggcccttcaacaaggtcgggtcacctatggagtcgcggccggatcggcgaacgcttacacgttgacgctagttccgcagctccaaggcggcctggtggatggcatgattcttcgggtcaagttcaacaccatgaacaccggcgcctccaccatcaacgtctccggactcggcgccaaagccatcgtcggcgcggccaacttccctctcaccggcggcgaacttggccaaggactcatcgctgagcttgtattcgacgcagcaggcgaccgctggagaatcctcgcaggcgcgccacgcatccaagttggcaacgccgatcaagattaccaggcccccagctggaaacaggtgaaggattacgtcgcgtcccaaaagctgactgaagtggactgggctgacgtcgtcaacaagccgaacgtcgctatccaagacactacgccgtggttcgccaatctggagctgtctgacgctcggcctttcatcgatttccacttcaacaacaaccgcgccaaagacttcgactatcgctttatctctgaagctgatgggtcgatggcgttctactctcgccaggggtcagctggtcctacccaggatatcctgttcagcaggtcgaatgttacattcctccagccgcgactggatgttgcgaaaaacctcgcgtacatcgcgaactctggtcccctttggcagaacaccaccgccgatcagcccggctggaagttcactttcgcacaaggtgtggacgccaacaacaacgcggttatcgcagtcaataccaccaatccggacggctcctatcgctcacagatcatgcgatgggactgggcgtccacgaacgtcatattcaacaatcgtccgctctttgccggtcaatacactccttgggattctggaaactttgatccctccaccaagttgactgtgaatgccacgaaccaaatcgccggcccgaccgggattcggaatacaaacggcaacaccggcaacatgaacacatggggctccagttccacgacggcttcatacggaaacgctgctcttcaaatcttcgggaaaggtggtggcgagcctgccgcgctttatttcgacaactcccagacaggatggtatctggggatggacaaggatggacagctcaagcgggccggctggtcgctcggcaataacgcctacgtgattaccgacgaatccaacattcgtttccacgtgaattccatggctggcactcctgtttggggcggaaacgaattctgggggccgtggaactttaatccgaacaccaagctgaccatcaaagccggcacccaggaaactagcagcactgcgatattcagcggaactatgccattcgctccaatcgcatcgctgtccgattattctcaggcccctttgacggtttacaacgcgccaaccggtccgtctgcaaaaccggccgtcatcgcgttcattcgtcctggcaactggggcgcgttcttcggcatcgataccgacaacaagctgaaatggggcggcggatcgctcggcaacagttccagggaaatcgccgattccagcaacatcatgaatctttgggcggccaacccgaccgcgccgtcctggaacggccaaaccgtttggcgatccggaaactttgatccggcgacgaaagtggatttgaacgccgcgaacgccaccaacggcaacatgatcttcaaccgcatttctggaactggtagcggcatagcttcgtcaggtcgagttggcgccatcaacctgcagaatggggcgcattcggggcaagcggcagcagtcactttcgagcggggcggcagtatcttcgtcaacttcggcttggataccgacaacgttctcaaagtaggtggcggaaacctgggggcaaatgcctatccggtcatccacgccgggaactacaataactacatcaaccaggcgctggttcaggtgggtcttggcggagtcggttcctatggcatctttgcggttctggacaatgccgctccaaccgcgaccgttcaaccgggagtggttgtggacggttccattctcatctactcgtcttgcgccgcaaactacaatagcggccaaaggcctgccggaacttggcgctgcatgggatatgtagtcaaccgggatgccaacactcctgactccgcgacccttttccagcgagtgacgtaaaatgaaatggacgcggatcagaaaccctcgttggctggatgaaacaaacatccacgccatggtgactttcgatgagatcggggaagttcctttcaccgccaatccgcacgacgtggaggcccacggaagggccatccacgctgcgatcctatccggggcgcacggacctatcgccccggtcgatgcgaagcgggagcaggccttgcaggacgctatacgggccagggaaaagcgggctatccttcgtgatacccgctggcccatagatcgtcacgacgagcagaggcggctgggtatcgaaaccacggacggacctgggttgatagcagcccttgttcactggaggcagcagattcgcgattggaatagcggggatcggccgcgacttcccatggctctgaaaacaatgttcaagaatcaggagtattgatgaaaatcacgaaggatattctgatcaccggaaccgggtgcaccacggatcgggcgatcaagtggctggatgacgtccaggcggccatggacaagttccacatcgagtcgccgcgagccattgcggcctacctcgccaacatcggcgtcgagtccggtggactggtgagtctggtggagaatctcaactacagcgcccaaggattggccaacacctggccgcgccggtacgcagtagacccgcgagtccgcccgtatgtccctaatgctctggcgaaccgccttgcccgtaacccggttgccatcgccaacaacgtgtacgcggatcgtatgggtaatggctgtgagcagggtggcgacggttggaagtatcgcgggcgtggcctgatccaactgaccgggaagtcgaactattcacggttcgccgaagactccggcatggacgttctggagaagccggagcttctggaaactccggccggcgcgtcgatgtcttcggcctggttcttctggcgcaatcgctgcatacccatggcggagtctaacaacttctccatggtcgttaaaaccatcaatggcgccgcgccgaacgatgcgaaccacggccagctccggatcaaccgctacctgaagaccatcgccgcgatcaatcaaggctcctgacattcgcccaaagaaaaaggccgcttattcagcggcctttttgctttctggctttgcctcttcaaccatcttgacctcgaccggcgcggcggactcctcctgagttaccgaatccacatagttccctagtgaactcagaacgccgattaacagcgctcttactaccttgtccttgactgtctcgcctatgatcttggtcagaacggatatcaactcttcccggagtcttgggctgattcttggccgaaagcgcttgcgatgctctttgcgtttcatgtttagtcctctgtctgcggtcttctcctcaccccgataatggcttggggatgcgctgtgttggtcggaagggtcgggcgttattataactcgacgaaaatgctcgcgcttaactgtttaacgatacgcaccgcgatattaagtcgccttctttctggccaaggaactctggcggccgggtccggtctaaggcttaatttgtcgacattaaaacgagaaaacccggatcgcctgtaggataaggcgtccgggtttatctcgatctagtgtacgctagaatcagtggcttccgccccatccgtccagccagcaatcgaagacggcgtgtcgcggcttgtccttggcgccatgagagaaatgcttgaatcggatgacctggcccttgatggactcccggtcgttccagaaacgacgtttctcgtcgtgggtcaggctggaggccgacacgttgaaggtgacgccaggccacagacgttcgttgcggcagacgaatgcgccgaccagcccggatggcgacaggttttccgcatggctggagcgagccgtgcgacccagttcattggtgaaagattcattattgttgtgcatcagctcttctacgtcgatgatctcagcttcgtcgtagtcgtagcgcttgactttcacacagtacccttccttggccgtcgagcgaccgaacttatacaggccgtctgcacgcttgcccatggaaccttcgaatcccagctcggtgtggcggcgctcgacttcggtgaactgctcgatggaagttaccagctcctgctcgaccaggtgaattctctcacagccgatgcagttgcgcaggaagttcacgcgctcggccgccctggacaggcgctcttcggtcggtgcgcgatgatcggtgaaatcgtcgaacacgtggaaggaccagtccggttcaccactgtggcggcgaagatcgccagacgatttctggaagactttcgggtcgctgatgtcgccgcacaccagctcgccgtccaagccgttgaacaatttatcactgagatattcatagatcgactggttagtctgccgctttaggcttcgagtcaaagcctccccttcgaatgtgaaacagcgaaatccatcgatcttcggtgagaaatacatcggcatctggctttccaacagcttcgggtcaaaattcgatgcgagcatgggtttcatacagttctccagaaaagaagcccggcgaaccgggctaaatggcggtaagccggctcagatggtttcgttggcgtggttcagttcggccatgatcgacgcatagcgctcgtccgactccttgatgaacacgccgtcgtacatgacgcctttgcgatccttgatggcgtcgtaggccgcagcgtagcaggcgagcatggtagtgtcgtgctcttccgtcacatcgaacagagtcatgacggccaagaccaggctcttgatggctaatccatgatttccgcgtgccagcgcgccggccagatgtccgaggtgctgcaaatcgtcgccgtaggtgggatgaacttcgacagtctcgctgaagaccgatagatgatcgaacagattttcaccgagttgcgcggccatgaccgtggcaaccaccattacgtcgccgatgccgtctttcacctcgactggtttgttataaacccaggcttcgcaaacttctgcgaactcttcgaccaacttcaggaattgatccttggccgaagagcctttgatcaggttccggtcggaaccccatttaacaaccaggtcgtgaagttcgcgactcatgatttgttcgatattcattctttcgattccttttggatttgggatttgactgcgttgattatggacgccgtgctctggcgcgatccatccttggtggtgccgaagtagaaggccattaccgacttcagctcggcgaaccaatagccgatgatggtgccgatggcgaccgaggatgtcgggtccatcagagcctcgcggccgaaggtgaagattgcgatgatgatgagaatggagcctgtcagaagagcgaatgtaatcgccgggcgaacgaaatcgttctgctgcgcagcaagcctcctcgccgaatccctgtctgccgcctctgcggcgaactggctaagctcggcctggagctggttctgctcagactgaaggcgattttgttcggcttgaatcgcaagctcctggagacgaacgcgctcggcgctctggagttcggcgagacgcgctagagcttccggattcgcgtctagagcgctagcgaccgaggctgggtcggccttcgaccccagcgccgtcgcgacgatagcgccaacggcggcgcctgcaggcccacccaggagcgaccccagagccggggcagccgcgccgatcttactacctatgtctttccagtccatttcgactcctcaaaagaaaggcgccattacagcgcctttctccggccggtgatttagaactcttcggcttcggtcgcatcgccgacgccaccggcgtcactgcgaggctgttcctgcttgctgtagtccaccttcacctcgccgccgacgaacgacttgtacaggtcggccgcagccttgaagtgatccgggttcttcaccaggccttccagctcgaactggacgccggaccagctgcccttgtcgttcgacatgcctacggtggtcatacggaccaggttggcgaaagtcggcggggtgcgcaggccctgcggggtctgaacctttttctgggacagcgcggtcatgagcttcttcgaggccttgatctgcgaagacgacagggagatcagagcctggccgaaatcgccggtgtccggatcgatgacgatgacgtaatgaccacgggtgtcggcgaagtagtcagacttcttgtcgctgaccgaaccgtcttcgttcggcgcgtacaggcgtccttcgacttccttcaccttggtcgggtctttcatcatttccttgaagtcttcgacgctgatggcacccttgaaaccgccctcggcctcgcgaccggcccagcggatgaactcgcggcggtacgcggccggaatgatcagcaggccggtcttgccgtcgtaaaccttgccggtgacggtgttcaggaacatgccggccttcgcgccttcgatgtacttcgggtcatcttcatcgacctggggagacatcttctgcaaaacctggatgaaggggatggcataggactcggcatcggcgccttcgaagcctgcgccgtcatacgatcccaaatccatgaagtcgggaacttcggtagtcgcgacggcgccgccgccggtggcaactgctacggccttggtttcttcggttgcttcggaagtttcggttttcttaccagccatgttaggctccttgtttgtcgaatttcagttatcgctaactgtgggtttataataacggaagttgcaactaagtaaagcaaattacatattaagatttgctctttttcaccttcggtttcgtgattttggcctctttgtattcgtgcacgccgatgaaatctggcagctcttcgcccttctccaaatactcgcgaccgaacgcctggagggtctggtagtggacatcgcggttgatggtggcgtcatagccggcttcgatgatggcctcggccgccttcttcgcatcttccatttcgccgcgaccgaattcggccagaaccttggtcttgatgatgccgtcgttgtcggtgtcttccagccacttccagaacttcgatttgttctcttccttgacggaaatgatggccttcggctctacttttacagtgcgaccgtccgccagagtagtggtcttctgaccaagctcctccaacagctccggaatggtgttacgcttgagggtcttcagctcctcttccttttcggccagcgccttttgaagatcgaggatttcgccgtccagctgcgaagccttgtccaccaagttcagcagtcgatggccgatgtcggtggcttcaaccgccatttcatccatgacgccaaaatagtcgatttcgcccggcgcgttctctttcaagtattccgggatttcaagctcttgctctttcatgtccgcctccaacttagtgatgttcccttacttgaaccaagtattgagtagatattatgccgcatcttccttgatacggctactgatttacatattaaatttcgtcgcgagtgctaacgtcagcctcaaacacgccatcaacgacataacttgccaggttgcgtttccactccaagctgacctggattttctcgtcgatggaatccagacagatcaggtcgaagtacagaaccgagttgacggtgccgattcgatgatttcggtcttcggactgcatccgcagctcgttgtcttcgtcggtcgtgtagtagatggccacgtctgcggctgtgagcgtgatcccgatccctgctgcggccgggttgcccaggaacacctggacgcgcttggcctggaaatcgtcgatcaatttttcccgctcggcctctttggtctcgccgtagtaggtgccaaacgaaatcccttgggcctccaaatacgccttgatctggtcgatttcctgaatgcgcatggcccagacgatgatggaacgctccgggtcttcctccagcagaccctccagaagatcagtaaacacggcgaatcgcgggttgtcttcgggcggcaggatcaccggctcaccatagacgttgatatagccggacgccacttgcttgagcttcgagcgcgctgccgcagcatcgaaagatacatccagcatgaaatcttcgttctggagaacgaagtgatagtcttcttccacgcgctgataaacctttcgttgctccggcgacatttcgaagtatatgcgcttgtacaccttgtccggcaggaatggcaatgcttccttcttcgtgacccggaagctgtgcggctcgatcagggatcgcagcttgtccaggttccggaataccgggcgcccataatcgtctttttcgacgagttgcggcggcatggtttgcttcccttccagcttgcgcatgatagcgatcattcgaggatcgtcactgggcaccaagacggaaaattcggccacaaacgcccgataggatttagtccccagaattccattccgcaagaattggaactgcatgaacaaatcggtcggcgcccgcgtcagaggagttccggaaaggatgcgacgggccacggccttctcgcccagctttacgatctttttcgcacgcttggcttgtgggtttttgatcctcgttgactcgtccacaattgcgcaaactttgaatgtatcaaggaatcgctcgacctcatcatagccagcctggtggttgattgcgtcaacgttgatggcgaagacgcgaagaactttttcatctgcgaacgtctcggaatacagacggtccaagcgcgccctggcctttttggaagtcggtcggccgcgccaatccacgctcaaagtcttgatcgcgacgtgggtgggaatctcgcgcagaatccagttggtgtggacgcctttgggggcgacgatgagcagcgcgtccacgcgcccctgtaggaagaggcgaacggcatcggccaaagtcgtccaagtcttcccggtgccctgctccatcaggtatgcgaagttccgtttgttcagggacgctgccagggcattgaattggtgctgcatggcctcggtcttcatgcccttgacgggatatgttttggctttcatttgttctccaaatcggcgaggaactgaacaatgttatccagtccttctgcatagctcgcaacttccaccaagtcgcggctgttaagctcgaacaaatcgaacataggattcagcagcagccaatcggttccgatcttggccaggacgaagccccggccaccccagccgatccgctcccgaagaaaagggatttgcccaggttcgaaacatctggccattgggcaggtggaagcgcgtttcggccactcctccaaagccttgaactcgacccagaactggacacctcgacgattcaggcagatcgaatcggacatgccagaccgccgcgtctccagaaagtcgatcaggattcggccgagcgagcgctgcttaaacgcattcgccgctttcgtttcgcgatcattcatcaccttcgccctctttggaaactttctctgcttgcgctgccaactttgacttctcgcgctcggtcaatatccgcttgacggccttcacgatgaacatgtcgatgccgctgagcctccatcctttgatcaggaaccaagcgccggtcggcgtcccttcagcaatctgctttccgtattgcagatatttttcaggccgaattctgaaacgtatcggctgatcaaccgagtcatcaacgcacatgatgtcgagaaactgcgactggcccttgtacaccgggtttttcccttgatcagccctcttcttctggcgaatcggttcgttctcatcagacagaacttttttcaccatcttgacaatgaccagaccatcatctccatcgcggatatcccgaatgttctgaatggggtttccggaagttactccaaccagctccggattgtcataagcatgaccccagagcgtgtgagcttcgttcaaatctgcgaattgaacttcagaattcgacagactcgcggcgactttctcccaatcctgaagcgtcttcaggtgggtgcctgccagctctttatattgagccttcagctccttaagatcggccttcaactccttcagatcggccttcaacagtttctccagttctttgtcttggctgattttcgccgaaagaatctgggcttccagagctgctacatcagcagccttgtcctcaacatcctgtgccgatatcgggcaattggccagggcgatcctcgcggccttgacttcctcacgaagacgcaggaaccgctcggccttcgccgggccgaagcctttggcgttcatgatgccgccgatcaggcgcccgtccgccaccacccagttgagttcggaatgctccgggtccagggccgtatattctacgccttctttggccaattcgcgaaggatagacacagtttgctggtcgtccttcgccgcccgaaggcacgcggccgcgtattccaggcgatgataccgcttcatgtagcaagtccagtatgtcaccacggcatagcttaccgagtgggagcggttgaatccccaggcgccgaatgtcaccatttcctgccaaactcggtgagcgtcttccggggcgacgcctatggtcttggcgccctcgatgaacaattctcggcgcttgttgaagaactcttcgcccttccgcgccgacatcgctttccggatcgccgacgtttgttcccagtcgaactgaccaatgtccttaacaattgacatgatctgttcttggtacaggaacacgccatacgtccccgacaaatactgctcgacctgcggaatggtataggtcacaggctcgcggccggccacgcgctcgatatacttggttgccataccagaagacaacggacccggacgggcgagcgccgtgatgtggtcgatgttctcgaacgcggtgatgttgatcgcgtttgctaccgagcgaacggcctgcccttcgaactggaagatgccggacattttgtcttcattgagaacgtccagaaccgccttgtcgttcaaaggcaagtcgtacaactcttgcgcggtcacgcagttcgcgtcctggatgactcccaaagttcgaagtccaagcgcgtcaattttgaggagattcagatattccgaatcgggcttgtcgagctgcgcaacgccttcggaagtcaccgtacagaagtcgatgacttcatcgttgcagaccaggatgcctgccgcgtggacgccagagtgggatgggtgaatttcgaggtcgcccatgcaggcggacgcgatctcatacttttcgcggaagtcgcggccgggctgagttttttcgaaagtgtcctccaatccttttccatatcgttcgtccgccgatgtatattcgatgatcgagtttttgatgttgtcggtatcgtggaaggggatgccgaagcgttttccgacgtgagcgataaccgacgcggccttgagtgtgttgatgttcccaagctttaccacgttccaagtgccgtatttctgctggagatattcgaacactaaatagcgatgggtatcggcaaagtcgatatctatatcgggaagatcggaacgggaaatgtcgataaagcgctggaagagaaggcgatgcgggagcgggtcaacctcggtaatgcccaggaggtagcagaccaaagagccggctgaagagccgcgagccgggccgaccagcatatgcttcttggcgaacgcaaccagatcggcgaccaccagaaagtagctgtcgaagtctttcagctgaatctgcttgatctcttcttggaatcgatcctcatactcctgggtccattccttgatgtggccgcgactgaggcggtaggcttgcccctcgcgagccagagcgacgatatcaccatccaagtggatcatcggcgccttcgccagtttcacatccgccaactgctcaactaccgcacgagtattggtgatggcggaatcgaactcttcgcgagtcatgatatggcgtaaacggctccacaactcctcttcagtggcgatgtggcgaaggccgaccgactcccgcaccttccaggccgacgcgaaatcagcatggtcgatggacggcatgtcgttgtaagaggtaatcaccaccggctttccgaatgctctggacgtctccatagcaccgtgcgcggcgaccatcgacgcgggattgatgtcaatgtagtcgattccggccagatccagatgggcataggcctcgccagcgaatttgatgacgccgtcagcttcctggaattcttgcggagtcaatccttgattctggaccgacttggaagtcaagcggtagaacttcttagtttccttggcaagcacccaggctttgagcttcagctctttttcgccgtcgtcggcgcatttgatcggaatttccatgccgaatccgcgaggcagttctgctttggtagcagcctgctcccaacggacgtgaccccatgttccatcatcgacgatggcgacgaatggggattcgatctctttggcgcgctcgatgatctccgggaatcggccatatgcggcgccataggagtaaccggagcgaacgcggagttgagggaaagacattatgcggcctccattgcttgatacgcccgatacactcccatgcgcttgcagacttcgtggagcagccgcacgtcgtcgagcgcccggtgtttctgtacatatgggccgcagtagtgctcataaagatgttgcagccgcatgcggtggccgaacaacggcgccgactcttccacagtacagatatcgagcgatgggaaattgacttcgtccaggccgaacttgccgcgagccagatcgcaggtcagcatgaacttatcgaatggcaggttgtgggcaatattcgcgtcggctctggcaaagaagtcgcgaactttttggcgctgatcgaggaaagatgggtgcttgatcaggtcttcgttcttcaacccggtgatcttggtgatgatttcctcgatgacgattccaggattgcagatgaactctacttcagccaaaatcttttcgccatcagttatcacgccggcgaattcgatgattctcggctgctttctcagactcaccctctggtggaacgggagtcctgtggtctcagtatcccatacagcgaatatcatgtttgttccctcttatgtcgaaaggccggctgctttcgcgaccggcctgaggagtatatcgcgacggctgaaggtttacgccttctgtccgtctttcggcgtgatacggccggagcgcatggtggcgtggacaaacgccgaatagttgatcgagtccaaagccgaatcggcatccttgaatccgctattcgccaggcgagtgagtttgcccaccatatgcatcacgaacagggcgagccgatggtcatctgcggtcttcgccaccaggccgttcgggaagaggatttccatgatctttccgtacatcaggtcattgcgaccataggtgctctggcgggcgcggaagacttctgctgctgcgtacagattgttgaggacatcttccgcgaaatcatcgggatgagcgtcatcttcgccaggccagacggattccatggcgaacggcgcggcggcatcttcggtcgggtcttcggtcgggtcttcggactgagccgtttcagcgagcggagacggggctttcgcaaacgcctcgtcgagggtaggggcggagttcggggcggccgggaacggctcgcctgccatgtcgttgggcgcgctatcggggtcgctatcggccgcgacggcgaagaacggcgcatcgcaaccttccaggttcaggatgtaggagtcgatccccaggctattgtaggcatcgatgatgtcctgtcgatcatcgaatgccgctacgatcttggtaacgccttcgattttcttcaggatatcaagcgcgactgcccgcttgaactgaggcgccggctcggtgttaccatacggtcgcatgatgagttcgtactcgcgatgttcggcgatgccgagttcgcggtggatcttggccctggtctggaaaaagtggttgtcggttcggccggtgatgaagaagatcatgaggtctgcgtcgatggcatttctgatgcgacctacagcgtgcgggttgagagcgtccttgtcgagacgagaatgatactcgtcccattgccgttccaaggctaagctcttgcggtggctatcgtcgaagacgcagccgtccaggtcgaagatgatgatgccattcttgggtttgcgttccatattcagatttccttggtggttgctttctgggtgacggttttctcgatgaacgtcccatcagaagtgaggcggaaaacttcgccgttctggatgaaatcgaacgattgcacgttcatcgtgatgcgaatggattcgctgccgttggtcacttcgacttgtgcgatgtcgccaactttctcgacaatgatcttcatgttacatggacttcccattgacggccacagggttggcctcttgtttttccgatccccagaaatcgcggcgcagttcttcctgctcggccgagcgatccatccaggggcgatagaacttgcactggtagataggttccaacggaacatcaatcacaggaatctgacctggctttgtctccagagcggccatgaaccggtcataggatttctgctggatttcctcttcattcatcaccttcgacccatagcgcgggaaggcgcaggagccggtggcgacgcagtgcggctggagcaggctgtcgaacataggatagacttccagaaccagccggcgcatttcgcggaatacttcctgatattcaccctgggtccgaacgcacaggcgaaccttcgccatgtcgctgagagtccgcagattgaacttggccgcgatcttcgtttccatgttggaagggatgatggcacgagcatcctggagcgacgcgccggcctccagaagcttctggtagctggtttgcgcgtcggcaatggcgtcatgccacagacggttcagctcttcgcggacatggtaggtcgggtcaggctcgccatttaccgtagccggttcgtcgaattcccagcggaaggcttccggctgaacgacggcgctgatttccagagcgcgactggtttcctgctggtaagccccggtccgagtccgaacgagttgatgggtgaagttcttgctgacaccctcgatctggaaaatgaagtccacgaactcgaacggcgagcggatggtgtccagcatgtacttccagtggtcaagcttttcggcctcggtcatggtcgccgggtcttggccgcgcatgcgagtggatttcgtccccaggagaagttcccaggcgttctgggtgtaactgatcagagaaattttcatcagaaatcttccggaattggcgtgaagtggaattttttggttagagccagggccaggccttgggcttgctctttacgaaggccatactgctctatctcttccttgagcagttcgcaggcctccagacgcgactcatactcttcagcctcctgaacggatgagaaaacggttccatcagaggttctgtacacaagttcaatcgacatgatgacctcagtagcagcggatgatttcggcgcggatatctcgacggtcgaggtagcgctcacgaatcttatcgcgggcgcgctcggcctcttctcgactgccgaacgacaggttgaacgaagtgaaaggcttatcgtccagttcagcgccggtttgatacaggatgcctaccagaacgaaagacggcgcggtcttcggctgctggtcggcttgcatttcgagttcgaggaaggacataggaacctcttcaggatgatctggtgcgtaaattaatagcgctcctgctgagcagctacggtttccggctcgtagatgagcatgtcaacgatttccgggcactggcctttcacccagtcgatggccgcgaccagtgtggtggaagcggagaaagagaaagtgcggtaagactcatggatgtacggcgaccccatcgaatcgcgctcggtcgtgcgagaaatgactgctttgatattaacgattcggcccatcttcggcctccactttagcgattatatctgacaggctcagcttctcgccattcaggaaataactggcgcgaaacttcctgtcaccctctggcccgacgatccgggccgttatggtgagactcccgccgccaagggcatcggtgtccctgaagaaagccagcagcgcccgcttgagcgctgcctcgcgaggatcgacggccattaacctaccacgttccagccgtgctgagcgcaccaaaccgcaccggcccctgcaggaaggctattcagaaggaacacaggagtcaggcggccgtcctcggtcatatgtatgaagtagcgggcgccttcaccgagccattcggccttggcgatagcgcgttcgagattggccttggtggcgtaggttttggtgtggttcttgtcggtggagaaggttacttcgcgggccatttgtcgattccttttggttgaagggtttcgcgtttcgatgagggaatattacgcccacctgatccagaagtaaagcacttttgtaaattacttcacgaacatctgcttggccttctgataagacgaagaagtcatcaggcgctcgatgacgtccatgtcagaaaccagatcgtccagaaggacgtttcgccaagtcgcgaaccgacctagcgagaagatgccggcttcatgggtgagattccaaatcatggattcgcgctcatcgcgaccgagcggaatgattttacccttggtctggatggtcggctcgccgtcctgaatgagattcttcttcctgatgccgaaggccgagcagacgtcatccaggtcccaggcgctgtcccattcgatggttttgatttcgcccgcagcagtctccaccactcccttagtaatggattcgacgattagggtatcaccggtgattgacgctcgaaacgttccgacttctggaccggggaagtacacagtttggaagacatcacaaggaatggaaagcttgtaccgacttacgacgatggaggtgccttcgccgaatgacgggtcgatacccaggtccagtcctgccgcagccagattggcgcggaatggtgctgtgctgatgatattaacgtgatcatcttgccggcgaaggaactggaagaaagaggcgtcgaaaggcctgccccagctgatgcgattcgccagcttagcgaccagctgctcatagtagtcggccggagcgatccaccgcttttcggtcgccatattccagatggaccgatccgacaggccgcccgttactttcctggagtacatgttgcagtggtcgatgcgcggctgggagatgaactcgccgtcgatgtagatagctttgtgtacagtgacttcgcggaacgggataccggtgagttggccaattactggcgagcggaatcgcaagagtgcgttgtgacgctccttgttctccggcgtcgccgcgtcgatgatttgggcttgaggaaagcgatgcgcggcgatcagtccggcgagtccagcacctacgatgatgactttctgatcaggaatcatgatgtgttccttctgagtgtacaaaacttgagaggataaaaaagggacccattttcatgagtcccttgaagagctagacgattcagcctcagaagagcggcggcttactcttcttcaccatcggaaccgtcggcgccctgatcttcaccgtcgtgctcctggccttcatcaccggccttctcgtcatcgccctggccagcttcgtcttccttcgaagcgatggcaaccagatcgacccagcccatgacttccagcttgctcagatagctgcgaaccgaggctccatacagcaggtgtgccactttctcgccaaaagcttcgatttctaccggctcaccgacggcgcagttctcgttgatgtaggcaaacaccttgccgcgaatcgaaatggcctgcggggtgccatggccgtcgccggtcgggatgaagtgggtggcgcgagggcgacgcgagccgttggacttcagttcttcacgacgggcttcggccttcgcacggcgcttttcctgctcttccttgcggcgctgcttctcggcttcgcgctcggccttcttctgctcggccaggcgcttgcgctcttcttcacgagcgactttctgagcttcctgggcggccttcttctcttcggcctttttggctcgctcggcttccttctcggccttcttctgctcgcgctcggcttccttggccttcgccttctcggcctgctcggcttccttcgccttggccttttcagcacgctcggcttctttggcggcggccttttccttcgccttctcggcgcgctcggcttccttcttctcacgctcggccttgcgcttctcttcgcgctcggctttcttctgttcggcttccttggccttggcctcggccttctcggcgcgctcgcgctctttacgttgacgctcggcggccttctcggccttgcgcagggcggctgcttgttccttggtcagctcttcgccttgggtctgttcgttctggtccatgttcttactccgggaatgtttgaaaggatggcttattggcctgtgagaggattatctctaaactaattgaagaagggaatacctttcgcctgaacttctctaaatatttttctttcgggaaagtccagactccagggaacttatttatgttagcgaagtttttaactcttacgcaaaaacaacaagtattcaattgcgcgagttatgccagtatacatcaactggctgtaaggaattgaaggcaagttttcttccaacattgcgacccgcttccattccgatccctgcgacttgtggaacgtcatcgcccagccgaagtcgaatccgccaatggccttctgtgcctccagccgcacatcttcctcaaccgaaaagctaagaggattgaacttcacccagcgctcatagttcgtgccgataatgcgaactttggcaaacagcatttcatccggctcgtcatcatcttcttggccttcggggaccggcttgaagtccagcagaattgcttgctcgccgttcatgatgccatattcgtgctggttcccggtgcacaccagcttctcgccgatttccggttgtacacccttgtagccgaggatgcggcgcgccctggcgttcaaacggcggcgagtattgttgtaggcgcaaaggatcacgccatcatcgtccaagaacgtccgcatttcgtcgtccgacatgtcgaatccggcccgtaccaggatgtcgtcatactcgcggcagggtaggcgcttgccctggcggacgaacatcgacgcccgaacgatatttccggcgttgcgctcgatttcggtcatgatggtgtcacagctgttctcatggaaaatctggacgccgcgcacaggaggaacttggccaaagtcaccaatctccagaaccggaatccggtgcgacagcaagcgctcttcatcccactcgccgatcatggacgactcgtcgagcacgaccaacttcggcttctcgtcgagcgagtctttgttggcaaacatgatttcgccgtcttcatcttcaccaatcggccgatagatgaagctgtggagggtccgggcattggtgcaacccttctcgcgaagccgcgctgctgctttcccggttggcgcgacgaagactgtccagtccatcgagcagcaaagttcggcgattatcttcgcgatggaagtcttaccagttccggcgaaaccagcgagtcgatagacctggcggcggtgcgctcgatcacaccaaccgcgataccagtccacaacggaattgatcgcgtcgatctgctgactgtttggtcgaaagccgaatcgctcttcgatctgatcgacggtgaagttagatgctgacatatttgcgttctccaacgctaggtttaatggaatcgaggctcagtttaagcacgccgtccacagaccagccagtgctacgacgatacttgcggccttgcggatcgacatagaagttcttcgtgcgccgcagcagaacataatgccaagcagctccaagcgcgtggacccttcctttatacgggaaagccttcgcctgctctgcggcctctttggccccagggagccagcggacggtagaaaggaccaggaccgcccccttaatagcctgggaagcggcgcggccgtcctttgggctatagcgatgtctatcgaagtctacccagtggtggttgccgcgccggagcttgaccgttcgggatcgcccctcgaacaccaccgtgccttcgtgagtaaaaatatgttccgccatcgaatgttcctttataacgtacagttatgctttacctctgcgcaggaagagtatactatcagctgactcgccaaagcgagcgaatttaatccaactttacttcggcaggaaagtggccgatactagcgccgccgcctgtactgccctccaaaacagaggatacattaaatgcaagaatgcaagatttcccgcgaccaactcccggtcggtaatccgaatcccaatgtcgacaagacccgcgacccgaacctgaagcccggtaatccgaatcccaatgtcgacaagacccgcgacccgaacctgaagcccggtttcctgcgccgcagccgcgagctggacccggcgctggcagttcgcattcgtcgcgagctgatccacgccgaagcatccgacttggccaaggccggatgggtcaattcacagtccagcctctatggatcgaaagccttcccgcgccattccgtcgttcgcgtgaccggagttccggaagatggagctttcatcggcatgctgatcggcttcatcgagcatcgcgagcatggcgaatgggcggtcatggaagccggaacgaaagaaggcggcgccgtcattattccagtcgatcacatcatgcgagcgtcattcgccgaagccgaagagttcgccgaaaagtgggagcggaacttggggtggcgtctcctgcgccaactccgcgagtgcggcgccctggccgggactgaagacgagttcctgcggcggatcatcaatcgatacgttcgtgatcgcacgatcctcgatcaccacaaagtcggcgcggacaaaacctatactgatgcagtactcaaaagcatcggcgaaacatggccgaagattccttcggggaaattcgtcggacaccgagtcgcgcagctcctgatcggccacaagctaggtcgagcggggaccatcctgaatgacctggtggacttcctggagaagttcgcggccgggcgcgataaagttctcaacatcgccatctgtaattgaggtgagtgaaatgcctgatttggtaaagcttagtcatcggcagtatgccgttctgctcgaaatgcacaggaattctgggaatccaattcacagctcgccaacgaattccactctgaaggctttgaggcggatggggctcgtcgagctatcctggaaggactccgtggctggatacatgttcggtcgccagccttgctggagcataactgatgccggcaggaagcgagccatggccatggccatgccggcgaagactatgggcgaagagcaaagtgaaatctgctccagcgttccggagttcgaaaagaccgactccagcaaactctatgaggctctggagacgatttctgagctggagaagaaatttgcagaatctgaaaagcgcggcgcagaactggccgcgagctattgtgacggcgtagtcggcgatgaatacggccatccttattgtcgttataaagtggaacgcgacgccgccttggccagggtcgcggagctggaagggaagttgacggactgggtgcacgaagggttccggctcaacgaggcgctagcggtcgccaaggctcaacccagcgtgccggaaatatctggcatcggtcgcgatgccgaacatcccagagctgtagtgctgtatctgcgtaacgaacccagcgatgaagatatgcgagcaattcagaactttttgcgcgccatggccgcccccgctcagcacagcgtgccgaaagcatggctcgacgttcaggcagagcgccgccggcaggtcgaggcccaggcgctaaggcaggaagtcgcagcactgcgcgcaagggcggatgttttgccggaggtgttcgggcttgagcggtaccgcgtagaaaaaactgggaagggtttctggccatactgcgtgcgtgcgggggatggaacgcgtgaactgttcgtcggccacttgaagcagtgtcagcgggtagcgaccgaattggctacggcgtttgaagatgggaagtttatcgccgcgcccggcagctcggctcagcacagcgtgccggagggttggaagctcgtaccgatggacccgacatcgcagatgacctatgtcggtcagtccctgcgttatggcgcggtaaacagcatcggcgagatttaccggcaaatgctcgccgtagctccctcacccatcgatccggccgcgcatcctcagccgtgccagcaaccacaggcccatcctgcccgctgcgggtgcgagcggtaagtgccaagtaaggaattcatgtaatggaacagaagaaaccttcaccagtagatggagtcatcatgaccagcctcgacgttctccggaaagcacagcccgaagcccaggacgagtatgccgtgtccatgttcgcaacggcgatccgccagaaaatgcagcgctcccgcgataaaggccgaggcggctggatcgactgcgacgaagatattctgatcaacggattcgccgaacatgcgctgaagggcaatgagaacaacctcctggacctggcgacgttcctgatgttcatgtgggtgcgcggcatcgatgatgcgaagattcccccggcgctcgaaaaggcgcgacagcacaagatcatggaagcatggagtcgggtccacgaagatggactaaactccgccagaaaggcgagtgctgcgcgacagttcgtggaagtgcctcgacgcaaggggcgcccggagcgacttgcatgaagcctcacgaaataagactggcacaggccgaagagttcctgcgcgaactcggccgagggattccggacgacgagagggtgatggtcggctacgctgaagaggccacagtccagaccgacgagaacggccgcaagctcaacgccggctggtggcctgtgccctggaaggaagggaaatacatcaactccagatccaacgcctacgcttgcatctcgtcatccatcaagacgcccaacccgaagaccggccagatgcgatactggcgcggcgaggcctctttcggccacggcctggcgttaatggtcgatgacatcggctccggcaaagggtccaagggcgacttcgaccgcgacgagttccgcgagcgactagagccgaccgcgattgtggagacttcgccgaacaactaccagttctggtatttcttcaaagagccgatgtcccacatgctccagttcaaggcgctgctctattcgttcgtggaccaggtgctaaagaaaggcggcgacaacaccgtcaaggacgtcagccgttatggtcgcatgccattcggcttcaacaacaagcgcgggaaagacggcaacttcaagtatgccgacgaaaacggcaagcccgaattggtgcgcctgtaccacgcagactattccaagcgatactcgccagaggaaatcgcgcaggccttcggcgtccgcatcattatgccacagatgaagaaggtggagataaaccgcgacgactgggtttatgaccaagtatggctgaagtatgccgagcacatctgcacgaaatacaagatgggagaagcggcaggcggccaggtccagcagaatatgtccggcaaataccgcatccgctgtccctggggcgacgagcacaccaacggcgatcctttcggcgcctactttcgcggaccgatccctggagccgagcacgaatatgtgttcggctgcggccacgatacttgccgcaaagagcatcgccggacttgggcggccttcacggatgaagtcgtgctaccatatatcgtcgaacaattggaaagaatcaaccgccgtcatatcggtgaggagtagacaatatgcaaaacgatcctggaatcctgattaccgccatcggcttgctgttcctcggccttatcatcttcttcgaaggcctaaagggatggaaaatacaagtcgcaaacttcctcgcgtcgcttctgtgcttcttcttcggcctttctgctttgacgttctggttcgtcgttgcgtttgacgtattttaatcgacgaacggtacagaaattttcggatggggacggaacttattagctatgccggtttaggtaggagataatagccgtccctttcgcctcaatgtgtagaggcaatgttgaatccgatcatgtaaagcagaaggcggcaaacctaacatgattatcgacgaagataatatttttgatgatggcgaatcagggtccagtgagtttgatctcacgcagatagaagatgctggaatggaccctttgatgaccgccgcgagcaaggcggccgacgatgcgattgcgaggaatgagacttaccgagcgcaaaaggcagcaaagtatgcagaggcgtatgcggaaccagatttgaagaagcgagcgcgattgttgatgctcgatcaggcctttgatcttccggtcagccggctggtgaaaggaccgttcgacgacttcatcaccaagtacagctcgacttcagacagcaactacctcgcggtctatgatacgttgttctgtaagggcgacggaactgtcccacacccgcatttcgacgagtttcgcggccggctggtggatcaccgaggtgtggcgttcaacaacaagaccctcgatccgattgacctgatgggcgccctcgcggctgcggccttggacgatccctcgattaagaagacgattgagacttgctgcgtttgggcgcgtcgatatcgccgcaactcgctgatcgagacgtttgagaagaagataccggattgggacggcgaagagcggatcgaaacgctgctgatcgacttgttcaaaccgttcgacaccgagcttaaccggatggtgagcaagtatttctggctgagcttgtactgccgcatcaactaccctggaatctcggcgccgatctcgttggcgttgattggtgggcaggatgctgggaagacttacttttcaatcttgatctgtaaagagttgtcgagcgaccgaaagttatcgccggtccagcttgacctgagccgtcatgaccagacgccatttttgcgcaatatcactggcaactcggtgatcgcgaacgtcggcgaaatgtccggcttcaaaaagggcgacatggaacgcattaaagagttcctggtgcgatccgatgatactttcgatcagaagtttgaaccaggcgaaactatcagtcgacaatggatcaccatcatggacggcaacggctatgatggtcttcaacgggatgagtcaggaaaccgtcgattttatccaatgttcgtggcgcaacttcccgacgaggatggcaagccgaattgggttaaaccgggcgatggaaatgaaactttccgcgttgacttcacagacttcggccgcaaattctggcaagccatggctgagtgccgcgcctggattaaggcgaatggcgtggagggatatctcagtctagttcgggcgaccaacaacgaagtccagaaattctctatttcggaaatggagaatgcgcgtggcgtggttcgtgacgatacgattgacatgtatctgatcaatgttctgatcagttgcgagttcgaagagatcaagcctggcaggaatgccaagaatcctggatggagggctgacaccgtttccattctgaaatggttcgatattctcgccaggaagaagccgatttctcgtcaccttactccgcacctgaaggcgctgggattcatcccgaataagaacggcctggctggttggtgcttacctgtcgataaggttgcacctggatggacgaatggcatgcacacgacgctgccgccgttcaatgatgcgcttgtgtacttgctgagaaagggcgacccggacatcactgatgaggctgccatggcaaaaattcgggcagtccgggccgagcgagccaagattttgggcgaggatttctgatgtagttgcggagtgtacttggactaggccgccttcgggcggtcttttctttggtgcggcgtacattcgattccggtggcggccgagtgagattcgaaagctatctggtaattaggattggttggcgatgttgcattatggaaagttcgtggacggtggatcgaggattttgtgtggtgattggatgaattgtggaaaatcgccgattctgactggatttttggggtcggccgcgtcgagcttaccggtaatttacgaaaccggtaattagggcctagccttagtgccgcgtgggtttgaagggctttaacggatactttccggtttcggatgcagccgcaaaagtatactacagcgaaaatcgattgcacaatcctaatagaaaaaatctatcacggacgttacctatctttaaaatcaattaaattaatagtaatttggtaatttggtatactttagtatttgaaagccttgcggcactaagcctgtacacttcccgtcaagtttccgattccgctcaactcgcggcagggtcgccggaaacttccgtccttccaatccatgggcagcggcaacaccacggcggactaagcggcaagtgccaaaactcgacgaacggaaccggaaatttgggagcgcgacagaatcgctcagctggacatatttctaacattcgatttaacactcaatccaaacactcaccaccatcatctcccgccaaccgccgactcgaccctcacccaccagcagaccgcccatataacatcctataacaccacctaacactcattcaccatcaaacccacccagacctacaggccacccacaagcagcccatagacgcgatccctggccccatagtacaatcgcgccatactcagtgtcgcggcagagcaccagggggccattcgccaaccaagccaccacgacgactccagaatcgaactccagggacgcagcaccaaatgaccaaattctacagccccgacgatctagtcacgccacaggaattcgcagacccgcatttcgcggcgatcaaccaaaagcgattcgacctgtacatcgacctgcgcgtccaaggctacagctcctggcgggtcttccgagccatctggggcgaggagcatatggacggtcccgctcaggcccgcatcttcgcgatggagtccaacccgtactatcgcaagcagttcaaggccaagttgaacgcgaccaaaacgtccgacttgtggaacccaaagacggcgctccatgaactcctccagatggttcgcgacccaaccgtcaaggattccagccgtctgtcggccatcaaggagttgaacgttctggctgaaatcacgttcgtggacgagtcgggcaagacccggatcggtcgcggtttggccgatttctacgcatcagaagccgaggctcagaccgcgaccgtcgctgctgcggccgaagccaatggctatgtgccggaaggtgaagagggagatttcccgtctccgtctccggaaccgaccgaggaagaccgcgccaaccccatttagacataaaataacatcgctctaggcccgaatcggaccgaactaaggcgaaggtagcgggaagggacgaaaaacgattctagggctgttctaggaagccgaccaataacgatcagaagcgacaaagccccggactctagttcagaatccggggctttcttttgggtttcttattcgccagcttcgatgatttcgaagttgtatttgacgccttcgtgctcgaaagtcatcttgccagccgccttcagttgcatacggaatcggatgcacttcgaagaaggcagaccgaactcgatgaatgctgcgttgcaggatttgaactcgccgcgcttgcctttcacggtgaccgctactccatgacgctcggtgcgcttgcgggctacttccgggtctttccaggagttggcgatggctgccgacaggtctttggcctctttggtcttctccggcgcgttcttcgcctcttcgcgcatcttccggatttcttccagcgcttcctcttcggtgatttcttcttccggcttcaggttctcttcctcggccttctcttcttccttcttcttggaagtgcgggttttgtagactttggccggggcttcctcttcctgaaaggcttcttcctcggccggcagagcattcaggatggcgaggcagcgacgctcagcagtcttgcggtcagagaaacgcttgacggtcgcatcggcgttgtgggcgttgtagaaggcgaccagttctttcatttctgcgttctggatgtcgccgaaggttttgatggagttggtcattttgcgatcctctgttttggaagatttcgttcgggcttcggtttgtcgccccgttgaaagagattatgcctaggtcgatgctgcgtgtctacatttatttcatcagattgatcgcaaagccgacgaacggttgtctgatgtgaaaacaccgcagagcaggctgcggtgtttgttggcgttggggtgatgtcagaaagtcgggactgtgataggctcgatgggcggatcgccgggcctgtcgttgtccgatgcgggcgccgggctggaagggatcgcacccgaccgaagcgccagcgattccgactgtctgcttacctgcggtggcggtggagccgctggtgcctttggagggattggaggcaggtcatttcgacccttgaccatttgcagagggtctggaagatcgggaagcgcgccagcgatttcgccatacgtccgcgccggatcgtcgccgaacatttcggcggatcggttatctttgacgatctggctgatggccgtcacatcgccgcccggttctgcaggatcgatgcccacgaatggagtggtaacgcagcgcatgttcggatgggtcggcagattgttcaggacgatggagtccgcccagacatacgggtttttgtggttgccgggtccgtggctgatgatctcggcaggaatatggccgttcatggtgagccattccgccatcccttgccgagtcagcgggcttaccacgatctggccagtagactcttcggcgacggcgaacagatcaccgagcttgaacccgatgatcatgtagttggacctggactcgccgacgaaagccagggtttcgatgttgtggtggatatcttgatcttcccagatgtacagcatggtgttactcctctttggcgaaattgttctttcgaaggtagtaggcgatcttcagtcgtggccagaacggcgtcagtgccacgttgtcgtgacggatgatcgcaaagttgtccgttccttccagccctgcgatgaagcagcgttcccaggcgctcccgctgtagcgatcatctggcttccagacgttcattcctgggctgagttcgctcgactcccatttatgatcgatcttgacgttcctcatgacgccctcaataaggctgcttgttgtgttcgaccagagacataccggccggaactttgaagcgggcgtattcaatcatcagcgccgtgcgacgccgattcgtgccagactcgtcattaacgaagagttcgcactgatgcgggatgactcgcgtcaccaggccttcgcctttcgagccgtagaacttgatgtagaccgcgacgcctcgcgtcatgttcagatggatcgtttcgcagagtcgctgcgcggccgacgcgctggacagatctgtcggactgaccgtcacccagtaatggccactttgttctttatcggacataaactgccctccaatgagaaagcctctgccgagtagcagaggctggttgttagtcgcgcttcatcaagacgactttatcatatgcgcgatacttcccgcgccagtcttcccagtagtcgccggccgggcaggtcagctccagagtgatttcgtctcgccagcattcgacggaaaggacgatggccttgttcctggctgcggaatctgctctgagtttaatcagaatctcgtcgcccgttttcagttcatcgactcttaccactttagccatgacattctcctattagaagggcgcggccagggcgatccctagccgcgccgatggattaacgtttgtgaaggatggacactgcgtccacgtcgaggatgctaatggtacggcgacggcgcggattgctgcgttcatggatgcgaatcaggttcgcaactggagcttcgtccaccacccatacgtcttccggtttctgcgtccggagcaggaccgtcacttcagtattctgggcgaggccgttgcagatgaaagtgaacttggacgagggagttctgtacatttcgagattcctttttggacttctggttcggcttctcagccggtgaagagattatgccctgattctcaccgccgagtaaagcatttgtgtaccaattctcccgtcaggtggaaccaaagtgcggtatcgcttatggctacgctaccgcgccatggcccttcttgctcgcacactgcgaaccacaggctgatttccatccttgccaggactcggccgaaagattcgaacctgcgccgactggacaggatgtcgacattcactcgtcgattgacctcataccggcgaccgttgatgacgaagaccagccgcagggtttgtccgtccagacactcccagtatttggtttcataccgaagccagtagcgcttgccagccgggcctaccatggtcatttaatcgatgctcctggccgcgccacgcggtccggtcggcgggacgggatcgaaccgacccaggatgtagtcgggccggcgcgcttcctgcggacaaacggcgagaaggcgccatccagcgtccagggcagactggagttcgtccgtgcagcagtcttccttgagcagcagacggttgacgttctggagattcggaccaggtatggccgatcctgtgagtgagttccaaccttcgacgccgtgcaccatctgcggttggttgatgtagccttcggacctgccagccaaccggcttgcggccagctccaggcgctcaagcatgggtcgcagagcagcttccgggtcaatgtcgtcccagagaaggaccaggctgatgatggtatacggatagtccttgtccagatcccaggctgaagcggtcagacggcccaggccgatttcattacacatcacgggaacgtcgttgctccaggtggacggctcccagttccgctcaccaggattcccgattgttacgccttccaggttccccaggagaacgtggagcttgctgacatattccgcctccaaggctttccgctcttcgtcggtctggttgtggcgatagaaggatggagggctgactttggcatggtagagtttcataactgttcctcggttttggaagatttgaaagttagagaatggtgtcgcagtatttctcgaaaggactctggcgcttcttctcgcagatcgcgcaggtgatttccaggtcgggcagctcgctgtaagtcttgccgagatacagccagcgcttgcacagactgcggccgtccgacgtgaagaagtggactttgcgagcattgccgggttgcgcccagccgcttggtgccggcttcctgctcataccatcaccacgtcaatttcgtcggcgaagaagttaaagccaactccatctgcgtagccagtgtaacgcagacgaatcgtcccatcaatgtgggcttcctcgacgccgatgacttccagggtggtatcgttgcagtacagcttgacgaacatcttgatgccggagccaatcgccgcgaaggcgatctgcttgtacaggtcttgcttgatcatgctttacgctcctgtttgcggatgtattctgccctgacttcggcttcgaacttcgcccagagcgcgttgtctgctggaccccagggaccggtctgagttccgtccaccggttcgaacttgccaccggcgcggcgatatttggacagagttttcaggctgatgatcttctcatcttgggaatcgaattggacgatcatttgacgtacttcccgaagtagcatgtgtggaggatttccagacccttggagatagccttcagcttgatgccgaaattcttgatcgcccagtccagatcgtggtgatagaactcgatgatgttgacgatttgaccggcgctgtagtggatgacgcgaaccttgccgttccagcggaagtcttcgcggctatttacggcctcgactgcgatggtgtcgtttctgccgatgttccatttggagctagtcatgtcgcaatcctctttttggagtgtttcgcgtttcgatgaggtaactatacctcagtcacctcatcgagtaaagcacttttgaacatattatctgaaatttctgttagacggatccatcggcggattcagtcagtggaaccgagactccatccgttgcgggcgaaggccgagcgaccagacagcttgcggcactggatggagctgccatcgtcgaaggtgtaagatacggcccagtccaggcgctcgcgacgtactgacgccgcagcgatatcttccagacgggctttgagaagctgttctgctttggtcatttcgagttcctctttggggcgcttcgtgtttcgatgagatgactataactcagtcacctcatcgagtaaagcgattctgaggaattatctgaagtttctggaggccagaaattgccgccagagccagtcaacgtgatcgttgaggtagcgctcgccatcggacgacagagccaggcatccatcctttatgccgagcttggagctggaaatccattcgaactcgaactggagcgttcctgggcgagggatatgggacaggctgtacttttgcacggtcaggaatcctctaaaggtttggagttcgcgatggacgcgactttctgcatgccgatgcgatagaattcggcctcttccctggccttggccagctgctccctggcttcgcacgccagcttgtgctggttattggcattctggatgcttccgtccagactcctgtccaactcttcccgaagagccttctgcgacgctagctcggcctccaaatcctggattctgagttgaagctggcggttctgctcggcgaccttgtcttcgcgggctacgaagttctgcaggcggtcgacaagacgagtattttcgcgcaccagctgctgtttggcgactttggtccttcgcagttctgctcgcaatgcggacaactccagcgcatgcagatcggcgtccgattcttgcgactctgcggcctgcttattgcgcagatagtattgcccagccgcgaaggcgagcagtgctcggtctgtatccttaactgtcttggccatgaagtgggctcgatacagaggcgcgaacttgcaggcgtctgggtcccaggccagattatcggccacaggccagaatgcgcgaaagcttttcgcatcgacatgcgccttgaccgtctgcgatgcgcccgactcttcgcagatgatttccagagggacataaatggcgttcttgatgcttcggaaagaaatggtggacataacacaatcctcataagaagtcgcggccgggaccatcctggccgcgcatcgtaatcactcttcgccttcgtccgcgctcagccactcttcgaaggcgaaattcaccttcgactcgacccaatcctgcagctcatcggcgaactcgtcactgtcgatgtccatggtgattcccataacttccatgttccatagcgcggcattcagttcgaactgtaccatctgctcgccatcgacttccagcaggatgcggtctgcgacttcatagtcgtctacatcgaacagatggccgcccgccaggaggtgctgtacgaaagcttcatcgaggttggtgacttcgatctggacttgtttggtcatttctgcgatcctctgttttggagttttggagcccggttcgccgggcgcgggtcggttaggcgccagtagtgatggccaggcaaacacgcttgtattcagcgctgtttttgcggacctcgacctgcaccggcatggtgaagctgtggcgaatttccaggcggtaaagtttggagtttatgccggaaaagctgccgtacatgtactgcttgccgttcacggtgtggatcatcgttttaccctccagggctgtcagcccggcaaaccgggcgggtgattccgttacagcaggccggctttgcgctcagccttgatggtgtacacggcttcgtcaaccagccactcttcagcttccaggtatgctttggcgacttcttcagtgaccacggccaatttagcgacgctcaggattttggcttgcttagtcatgttcggcttccttttgtttgaaggtttcgcgtttcgatgaggagattatgccgatagtcagaatggaagtaaagtgtctgagtgagaaaattctgcacaccgacgaacggttgtgctcgaccgtctgctgcggtgtcgatatactcggcctattgcgaacaatggactgattaa

SEQ ID NO: 10 - DNA, 66545 bp, Pbunavirus EPa11
  source 1..66545: mol_type = genomic DNA; note = EPa11
atgtacaaactcaatcctgcgctgcgagcggtctggcgaactcgtgcccgttacaaagtcatctatggcggccgggcgtcttcgaagtcgcacgacgctggcggtatagccgttttcctcgcggccaactacaagctaaagttcctctgtgctcgccagtttcaaaaccgcatcagcgaatcggtctacacgttgatcaaggacaagatcgaaaactcagagtataatggcgaattcatcttcaccaagaactctatcaagcacaagagtaccgggtcagagttcctattctatgggatcgcccgtaacctgtcggaaatcaagtccaccgaaggcatcgacattctctggcttgaggaagctcactatctgacccaggagcaatgggaagtcatcgagccgaccatccggaaagagaactcagaaatctggatcatcttcaacccgaacgaagtgaccgacttcgtgtatcagaacttcgtggtcaagccaccgaaagattcctgcgtcaagatgatcaactggaatgaaaatccgttcctcagtgagacgatgctcaaagtcattcacgaagcatatgagcgcgaccgggagcaggccgagcacatttatggcgggattccgaagactggtggcgacaaatccgtcatcaatctcaagttcattcttgcggccatcgacgcccacaagaaactcggctgggagccggccggatcgaagcgcatcggcttcgacgttgcggacgacggcgaggatgcgaacgcaactacgctcatgcacggcaacgtcattatggaagtggacgaatgggacggcctggaagatgaactgctcaagtcgtccagccgcgtttacaacctggcgaagatgaaaggcgcctcggtcacttatgactccatcggcgtcggcgctcacgtcggatcgaagttcgccgagttgaacgatgccagtcccgacttcaaactgatctatgatccattcaacgcgggcggcgctgtcgataagcctgatgatatctacatgaagctgccgcacacgacgatcaagaacaaagaccacttcagcaacatcaaggcgcagaagtgggaagaagtcgcgacccgattccggaagacttatgaagcggttgagcatggaaaggtttatcccttcgacgaattgatttcgatcaactctgaaacgattcacccggacaaactaaatcaactgtgtatcgaactttcgtcgccgcgcaaagacctggacatgaacggccggttcaaagtcgagtccaagaaggatatgcgcgagaaacgcaagatcaagtcgccgaacatcgctgactcggtgattatgtcggccattctgccgatccggaagcccaaaggtttcttcgacttctaaacacagaaaagcccggatcgctccgggcttcgggtcttactcggtgtggttcctggcgctgagtgtcgacgcaacggcctcgccgactcccagggcttcctggccggccgcgagcgcttcggcttccgactcgacgatgaagtcatcaccttggccgtcgcctggcggaacctcgaccagcacggcttcttcgccttcgaaccgcaggtcataagtcttttcgacggacagtccgtaacgggcattgagcgcatcccagagctgagcttcatagttgcgcaggtcttgcagagatttctggtggctgagcatcgccatatcgacggcccgttgcagggtttcgtccaggacgttgaatcgcatgcgaagagaacgaatccgctcgaccacttccgcatccactacatgtctttcgatcatcgcttttcacctttgctgaatgttacgttgtagccattgtcggccaggtaggtcagggcgccttcgaaggaagttccgacgagatgcttgagctgcatttcgcgttgcgcggcgatccagaatgccgttccggagaactctgcgtggccttccgacaataccttgccatcaggcccgtcgatccgaacgtgaacggaagatagcttcagtaccatcaatgaatccctccactggcttgcgacggcatgctttcagcgcgagcggcttcacagtccgggcagggacaggcttggcggacgcgctccaactcgtcggcatccatgacatagagcttcccatcggaagtgtcgtgcgccatggcgatgttcgggaagtcggcagcgctcaggccggcgacagcgcggatttcgtcccagagcgccacatgctcggcattcaggcgagctgcgagcgcttcgtgctctttcgctacacgagccatgaactcgtccatccggaatgcgaattccgcatcgatggatcgggccgaggccatggagttgaggcgaatcggttctttcttcatggtaattctcttttggttggcggttgttcgctgctcaggcctattacagtctgagcagcatgatgaagatgaacgcaaggaacgcaaacggcacaagtatgccggacatcagctttgacaggcgctgcatctcagcgtatttctcggttgacattccgtgctgcgccgcctcagctgcgaagcgggctttcgcctcgataacttccgggcgcagcgacaggacatattctaaggcctcttcccgcgctttttcggcctcgaccgacctagggtcgcgggccgagacttcgctgtgccctggcctcgcgggatgggcctgcagcgatggaggaagttcggcggccacgactccatagtcggcgcaggcccaagcgatcccgatgaggatcgcgaggatggattggacgattcgcagcataactttgtcgctagggaagctcatgatcaatcctccacagaccgaacgatttccaggttgcgcccggcattggtcccggcattgaaggcgcgccgaccgtcgctatcgtccaggcgcatgagcttggtaacatttgacttcttgtagccaggatcgccgaaatgttcgtgcaccgcagcttccttcaccacaaccagagacgttccggcagaagataccagctccatgcgcttcctggtgatggcctgaaggcgatagctgatttcctgggtcgcggccagcttgaattgcgcggcaaccttgacgttgaatcgtccgtatccttgagccttctgatactcccggcacagacgatcaaccgcttcgacaagggagttgaacatgttcaccgccagctcaacgtccgatttgtagcctttaaagcggacggcatgaccccagcgcttcgtagtcccgccgtttgcggcgtgccaagaagccttggcggtcgctcggtgatcgttgatgccaccggcgaaatccatgatgcagtcgttgtacgtcgccacggccaccgagaagaacttcatccagttcgggattgcggaatagtaacgagtcgcgatctgctcatcgaactcttcgcgaatctcgccggtcacttcgaagtcgtgaaggtcatatttgtccttcagcttcttcacacgctcggctgcaatggcggcttcgtgcgggctggaggagtcggccgccatggcagtcagtttgcggatgcggtctttcgccttctcgatggcttccggggtgaattcgttctggtcggtcatggtcggttccttttgtctgaagggtttcgcgtttcaatggagctattctgccttcattcagaatggaagtaaagcactttcttccactatttcggcatcgactggaagaaattccagatccaatcacctgctaccagcaagaggatgagggcggcaaagaacaagacagcggccgcgagctgtgcgcccggcttcagtttgggatggctgagcttgggctctacgggaacggccggagcgctagcgctgcaaccggcgtctcctgggccgtagccgatgccgcgttcacacgcctggagcgacaccagggatttaagatactcggtctgcttttgcgactcttcgtagatgccggcgacggcgaaccagagggcgaacactacggacgtacacacaacccaggcgccggtcagcaggagggccagcgggccgatgacgaagacggtagcagccaggacgattgcgccgccccagatgatgaagccggccagaccattagtgatgtcgacacagaactttttcattttcagattccttcggttacgggatggaggggatttgaaactctgcgccgccgagaacatcaatgacgacttcccagagcgtcggaacagaccactggtaacggtcgaagtcggtttcaggatcgacgcccagcgtcacataggaagtggcaggccatttatgaacactgcctttccgcatgagagtcgccacgcggccgtcaccgagcggattcgttctgtgcggaacgtacgcagacatcgaatattgctgcccggcgtcgataacaaatctttgcctctggcgcagacatacagagcccacaggattccagccgcgaccgccgcaagcctggcgagccgaagagtgttcataaccttcgtgagtcatttcgccgaggcaagccgagcgatcctcgtaatagttgatgttctccatcgatccaaccagtaccagagactcgaaatcgaatctatgatcgtggatggccgagtgattgaagcaaagccggcgcggcaactccgggtgccaaacatggaggcgccctgccgggagctggacttgaatgaaccccaggccgtgcagcgtgatcttgtccttcatcgggtcatggacggtgctcatggataatcctcagtagcagaaatgtatggtgagagttacgatggccaagccggtcgcccataggagggcgaaccaggccatggctttgatggttatgtagatcatccgaagaactttccggcacagatcggtccaatgcccatttcgatggatgcgtggttggtcaactcgcgaccgcagcaggagcattgaccagtcttccggccgtaggcgactgccgattccatcggcctttcaaacatcttcagaacgtcgtcatgctcagtgtcggtgcagtcgcgactcttgatgaatttgccattggtgatccggccgaggtagatgtcgcccaagacgtacaagctaccggcgttccggctgtgagcgctagcctctttcacaataacgatgagcggctcctcgccttcgccagccaggcggattttcgggcgcttgatgccagattctttcgccttctcaaacgccttctcgatgccggaaatgtccagagtcggtgcagcagcttcctgcgcggccactttctcgcgatatttggcgaggttttcgatggcgcgcttcgcagcagcgatctgattttctgtcaaggagccgtatttatacaacgactcctgaaggctctgagcgaagctgaaggaatttccagtccaccactcgacgatgtccgggtgcgcagcttcgaaggctttaattttgaggtcgcgctcttgcgcagcgctacatattttctcgatgcgcttttctgccgccttagcacgactcttggcgcgctgctccgggctggttttgtactctttgtatccaacaccgccgcaggcgaagcaggcgcgaccataagacgaagggccacggtacaggccggtgcctgcgcatttggtgcacttgtcgcgatacagcttcacttccttccgggaattcgggcgagcgcccatggacgcgtcttccagggtcttcggcgcttcgttgttgatcgctacggtagcgaagtcgtcacccaggtcttcgaagccggtgaacagattctctgctgcgttcatatcgattctcctgtttggaaagttcgtttcgatgggttgactatacgccagaaatggaaaacggtagcactttcgcactaccgttcgtcggatcgcagagggtcaggctacacggatcaactgcgacatgactgccaggttccgctcggcgacgccgatgatgacgttggttccgatgatgaacttccaagggtcttccctgttcttgtcgtagaacggatttctgaacagggtccgccatgtctcttcagtgaagaacgttttatggtccaggtcttggtgggcgatgttggagttgtagaatggaacaacgacattgagcgtcgcgccgactgccatggcccgctgcaggtctttcaccaaatcgatgacctgggctccggtgagatgttcgaagaagtgaaatgcgtagaccgccgtcaattcgccgtcttcatacggcactcggccgctggcgccgtcccagttcggccagtcgagcgattcgacgccgggaatcggcgaattgcctgcgcccaggtttactgcgcggcggtgatccggctcgatcaactgagcgatgtcgcgcttcatgccgagtttgaacaggttttgaatatccatttggttctccaggttgctgttagtaaatgtcgctgttgatcttgaatccatgctcagcgccgtcgttgtggtcgtactcagcatagctgtcgcagtagtcattcaaatgctgaatgatgccaagaacgtcgttcgcggccttgtgccgtttcgcggcgatggtcttggcgatgctgtcgccgacttccagggtttcggccgtccggcgatggatcagcaggcgactccaaagatagagccggacgcgacgaataatgtcgcgatggcgctccagtcgtccttgcaactcttcaatttcgtgctcgcgagatttgactactcgtcgaagctgctggacttccaattccaaatcggccttagtagccatgttcacctcagaaaggaaaatcgtctgggactccaggaagatcgacgatcattgttgagcctgagcggtctagaatacatccgaccgagccggccctatggggatagtgcctacacgaactgtaacaggtgacttccttgactattcgccaggtcgatcctccacaccatctacaaattggtgggcgcttcgactccagttttcgtttgtccaggatggcgcgtctatcgcaggaaaggcaacgcgccttaaccgacgtaaccatgggtatagtcgatcattcggatgagttcatcatcctctgattctctcgacttcagaccgcccaaagagtccgactggccgttgcatttcgcatctacatccatcgaagacaggaaacctgctgatactacggtgatatcaactttgtcgccggccttcttgaagtcttcgcactcagcatcgagggccacaaccgcactcgcagccatgttcacatgacttatgaggtcggggaagatcacaggaacttcacgcgacatgccacggaccgtcatcttcagtactacatacttcatactcactatcccttttgtatgtgaggaaagaatttgctgttttccggatggtggaagcgctcggccgcaggctgtctttcttccggacattgaatcgtcgaaggcgggaaaacctcgccggcgataatcgctgcgagaagtgcagcggatgtcgacatccagagggcggtttccaggcttacccgaactcccggacggcgcggcttcattcgctccaccctcttcccggctcataggatggtagactgccgccgccgcgaaaccaattgtcccacatatggttcagaccagtcggtggctggggcggcgggctgtagaatccgggaacttcggtgctgctcaggaaataaggcgtgcaaacggcctggacgaccagttgatgccgctcccacatcttatcaatcgctcttagcatgacgtcttcgcactgagccttgctgtcgaaccgtctgctagtatggtccggcatctggacacagccgtcgccagtgcaaaggaaagcagtagcaatccatacggtgatacttgccatttcgtcacccctttggttgatgagcagagtctattccatctgctcgccaggagtaaagtgcttttcgtcgggataaatgccgattatgtctgcgtcaagcatccaaatgtccacggacggatcgtcgctgctgatttgatataggttgtacagctcccgtccgccgacagcacgctcgcctcgcggctcaaccgccagaaccttgccgtggccttctccgtgctcgtccaggtatatgacgtgatcaccgacttcatagctttctttcgtgacgaggcgtgaacgcgagttgttctgcgattcaaccacccaggaatccagcacgccgcctttcatgtcgcggaacaatcttgccgatttgtcgcaatcgaacacgcccagaacttcgccgtctttcaacacgatatgtacgataggaagaagagtattcatgtttaatctccattgactgataattagagtctaatctgccgaaaagttcccgtaaagaattatttctcagaactgattagttgtaactgttaatctgatgtatgtgtttgaatctcttttgaacgtttgatgtttcccctataataagcgcacacagccaacaaccacgtggaactacaatgtttaaactttcctggatattcgggcgcaaaaaggatagtgctgcctgttctgaatcggcgccggagaaagtcgcacaaatccctcaacacgatccgctcgaccctatgattaagctgggcagaattcgcggctggaacgtcgagccggagaaagccccggtcatccgtagcgtgaaggattttctggaaccgggcctatccgtcgcaatggacagcgcgtatggtgacggaccgactccggccgcgaaggttgctgcgggcggccagaatccctatgtcgtcccgaccatgctgcaggattggtacaactcccaaggtttcatcgggcaccaagcttgcgccatcatttcccagcactggttggtagacaaggcttgttccatgtccggcgaagacgccgcacggaacggatgggaactcaagtcggacggccggaagctatccgatgaacaaagcgcgctgatcgcccggcgcgacatggagttccgcgtcaaagacaaccttgtcgagctgaaccgattcaaaaacgtcttcggcgttcgtatcgcactgttcgtcgtggagtccgacgatccggactactatgagaaaccgttcaatccggatggaatcacgcccggctcctacaagggaatctcccaggtcgatccatattgggcgatgccgcagcttactgctgcctcgacggccgatccgtctgccgaacatttctatgagccggatttctggatcatcagcggtaaaaaatatcaccgcagtcacctggtcgtcgttcgtggaccgcagccgccagatatcctgaagcccacatatctattcggcggcatcccgctcacccagagaatctatgagcgcgtgtatgcagcggaacggacggcgaacgaagccccgctgcttgccatgtcgaagcgaaccagcaccattcacgttgacgtggaaaaagccatcgcgaatgaagatgccttcaacgctcgtctggcgttctggatcgccaatcgcgataaccacggcgtgaaagttttgggaattgatgaaggcatggagcagttcgacacgaacctggccgacttcgacagcatcatcatgaaccaatatcagctggtcgcggccatcgccaagactccagccacgaagctcctcggcacttctccaaaaggattcaatgccactggtgagcacgaaacgatttcttatcacgaagaactggagtccattcaagagcacatattcgacccacttcttgaacgccactatttgcttctggcgaagtcggaagaaatcgatgtgcagctggaaatcgtctggaatcctgtagactccacgtccagccagcaacaagccgaattgaacaacaagaaagccgctaccgacgaaatctacatcaactctggcgttgtgtctccggatgaagttcgcgagcgtctgcgcgacgatccgcgttccggctacaaccgactcaccgacgatcaggcagaaaccgaaccgggcatgtctccggaaaacctggccgaattcgagaaggccggtgcacagtcgacaaaggcgaaaggcgaagccgagcgagccgaagcccaggcgggcgccgtagagggcgcaggcggcccggttcccgccgctccacgcgggactaagcctctcgcgaaagcggccgaggaaggggccagctcggccgctgaaccgccgtcgcgaccggaccccaaggccgagctgcggaacttgttggtcgatcttttgtcgaagctccaagacctggacgacgcgcaggctccggacggcgtggacatagagcaggatgacgcgccaggcctgaagagaacgtcaaagccgagcgtatcgggtatggagccttcggtgttttcgtccaaccgcatcgtcggccctcgtgatcattctgaactccagaggatcaaggtcaatggaattactaccttgatcgaaaatccgcgcggaagtatccggcaagggaaggacgggagctggcgagtccagatgaagcaccactatggattcatcaaaggtacgaagggggctgatggggatgaggtcgattgcttcgtaggcccgaaccttggttcgaaacgggtcttcgtcgtcaaccaggtgaacaaagatgggcaattcgacgagcacaagtgcatgctcggtttcaacaacattaacgacgccaagtctggatatctgtcttgcttccgtccgggctgggatggactcggctccatccatgaagttgatctgcccgccttccgtcgttggctggcaaatggcgacacgacgaagccatttggaggcaagtgatggcgttcaaagcctccaagaaacgcgaacgccgggggcctcttccagtcggaagaggcaagcccataattccttctgctggaatcgaagcctggtatcgaaagcaaatgaaggatatcaccaaactcatgatcgccgattatcgaagtgaaatagagaaggccatatcccagcctgcggccgaaaggtttttcgcgaaagatgaatcggtgaacgtcctgttcaagatgactctgcgaagccttcagcagcggtggaatcgcatctttgaaggtttcgcggcaaagatcgccccggagttcgtcaatcgggccgacgaagccgcgaccgctgcgactctacatagcctgtcggtggccggtgtcgatcagccgcgagcttcatacaacgaaagcgtcaggaacaccctggaagccgcgactacttacaaccataccctcatcaccaacattcaagaggaagtccacgagaaaatttacacatctgtgatgttgtctctgacttctccaaacccagaggaacaaggaacttccgggataacaaatgcacttagagaagtcggaaagttttctgaaaaccgaatcgaactcatcgcaagagatcaaaccagtaaactttacagttcgttgagtgatgagagaatggcagagaatggagtcgaagagtttgaatggatgcactcttcggcaggaaagacgcctcgccatacccacctggaaaaggacgggaaaagattcaaactgaatgaccctagactttgggaaggtccaaaggccgaccaaggaccgccaggttgggcgattaactgccggtgcagaaaaatcccaatcatttagtcgtcgataggagtgcgatatgccgttagtccatggaacttccaatgaagcccgttctgaaaacatcaagcgggagattaaagcagggaaagacccgaaacaggcagccgccatagcctattcagtccagcgcagcgagaaagggaagagggccaaagattgttcgcctgaactcgttgctgaccttcacgccctggtggactcgctgtcgaggctcgtaaaatgaaccgaaaggcatgcatacgcagactcgcgaccgatgttatcaaggccaatattcacggcggattcttcagcttgaagtttgccgcagtcgatctggccatcatcggcgtctcaatcctgattgttttcggcaaatgatgccgcgaaaattcggattctgactaaaaattctagtccggatagccgcaagttaccgtttctgggaaatagcggtaatttggaaggcctactgccgcaaggctttaacagggggaattcctaatttccgatttcgccgcatgctgcaaaagtatatagcatgggaaattagaagcaacgttctaatagaattcatctatgaggaacgttataatataacgtaaatcgatatgctctagacgtattgaaattcaatttttaattggtaaattggtaatttggattagtttaaagattgaaagtcttgcggcagtaggcttagacaaatcccgtcaaatttccgaaaccaagttaccagttttcgcggctgaggaaatccggtaattagatcacaatacagattctagtgtaaattaacagtcgcggctacatctaattattgttccgcttatttacccttggatgtcctgcgtatataatacagccatagtccacgactcttcgaattaacgatggcaaagtcgaaaagaaaaattgacgaaaatggatatatgaccatcgagggctgtccaatcagctcttatggcattttccaatattctgccggtcaactcggtcttccgggcgatccgatgcggattgtcaacgtgtatcgtccggagtctgctgttagcgatcctgagtacatcgaatctctgaagaatctcccgctgatcgacgagcacgaaatgctgtcgggattcgaaggcgatgacgacggcgtggctcccgaagacaaaggtgtggaaggcatcatcacagccaacgcctactacgaagctccatgggctcgcggcgatattcgcatctattcccgcaacatgcagcatcagctggaaaggggcaaggaagatctgtccctaggctatagttgccgctacactgagcaacccggcatctggaatgggacgccttatgaagtcgtccaggacaagatgcgcggcaaccacatcgccctggtaaaagagggtcgtgtgccgggggccagagtattggatggtctgtgctttgaccatctcagttttgatttcagaccatccgatgagggtaatgaaatgggtctcaagaaagccaagcagaagactcctgtccagcgtgcaggacaagctgctgattcggcggtcgaagagttgcgcgccctgtggccgaagctctctgcatctgtccagaagttcctgggcgaagaggcgcaggagccggagcaccaggaaggcgcagccgctccggccgaaccgaccgacagcgagcacatgaccgagcatccgactctggaaggcgctcaggaagacgacgaagagcacgaagaagcgccgtccgttgtcgatccggccgtggccgccgtcgatccggagcatcaagaaggtgccgcatccgaaatgtccggtgaaggcgaagtcgccgaactgatctcccaggtcaaggccattctggctcgactggagggcacggtagccgaagaggcggacgaagagcatgacaaaggtcaagatgtcgtcgagggcttggaagaacagagcatcctcagcggcgcgcaaaccgccagcgacgatggtggtgagggcaaggataacagcgaggaacttcctgaaatggcacagaagaacgcgcaagatgctgcaattcgtggtctctatcgcgacattgctgctaaagatcgcctctacaagcgtcttagttccgtggttggtgcgttcgatcaccgagctatggactcggctgaagtcgctgtttacggcgtgaagaagctggcgatcagctgtgagaagggccaggaagttctggcgctcgacatgtacctgaaaggcgtcgaagctgctcgtggcgcggccagccgtcaatcgaaagcccaggattcggccagttctgctccgcagtgcgccgagctggacagttacctgaagggggagtaacccatgttccagaaacaagtctatcgccagtacactcctggttttcctggtgatctgatcgaggacggcccgaagcgtgcgcggccgggtcggatcatggcgttggcatcggtcactccggccgcgactgccaccggccccaaccgcatcagtcgcgcgttcggttacgcaggtgatgtcggctccctcggtgaaggccagccgaagaccgttgccgcgcgcgcttctgaagtcgtggtcggcggcgcaaccttcttcggcatcctcggccacccgaagcattatgctctgtacgggtcggccggcgattccctggcccccagctatgacctgcccgatggctccgaaggcgagttcttcgacatggccaccggcctggtcgtcgaaatcttcaacggcgccgccaccgccctggatttgagttacggcgatccggtggcatatgtaccgaacaacctgcctaccgccgacaatgccctgggcctgccggccggcgccctggtcggtttcaaggctggctccatgccaaccggcctggttcaaatccccaacgcgcgtatcgtcaatgccatcagcctgcctgcccagtcggcagggaatctggtagctggcgttaccatcgtccagctcacgcagtaaggaggcgtcatgagccatatcagtaagacccattcgcgcctcgcaggccgtcacgcaaagccattcgacctgaagaacgtcacccacgaagccgtggccgccctgggtcgcatcggcctggtattcgatcacgccgtcgtccaggaccagatcaaggccttggcgaaggccggcgcattccgttccggctcggccatggacagcaacttcaccgccccggtgaccacgccgtccatcccgacccccatccagttccttcagacctggttgcctgggttcgtgaaggtcatgaccgccgcgcggaaaatcgatgagatcatcggcatcgacaccgttggctcctgggaagaccaggaaatcgttcagggtatcgttgagccggccggcactgcggtggaatacggtgaccacaccaacatcccgctgaccagttggaacgccaacttcgagcgccgcaccatcgttcgtggtgagctgggtctgctcgtgggtactctggaagagggccgcgcttcggccattcgcctgaacagcgcagagaccaagcgtcagcaggcggccatcggtctggaaatcttccgcaacgccatcggtttttacggctggcagagcggcctgggcaaccgcacctatggtttcctgaatgaccccaacctgccgccgttccagaccccgccgagccagggctgggccactgccgattgggcgggtatcatcggggatatccgtgaggccgtccgccagctgcgcatccagagccaagaccagatcgacccgaaggccgagaagatcaccctggccctggccaccagcaaggtggactacctgtcggtgaccacgccttacggcatttcggtttctgactggatcgaacagacctatccgaagatgcggatcgtgtcggctccggagctgtccggcgtccagatgcagggccaaacgccggaagacgccctggtcctcttcgtcgaagaagtggacgcgtccgtcgatggcagcaccgatggcggcagcgtgttcagccagctggtacagagcaagttcatcaccctgggtgtcgaaaagcgggcgaagtcgtacgtggaagacttctccaacggcaccgccggtgcgctgtgcaagcgtccgtgggctgtggtgcgctacctcggcatctaacagatgcctattcaccaaaggccgggcttccggcctttgttcaatctgactctaactcggttgtaggggccggttagggcataattactaggactacgccaatgactgtttatatcgtttcctccatgactcaatcggtgtcttacaatgcgtatgacacctctgatccgtccaatcctcgcctccagcgaaagattctgattcgcggccgcgcaggcatcgcatccgaaacttccggcttcggcgacatgatttccgacgaggcaggacgtccgatctggaccccacagggcgattgcactgccgtgagcgattcggatttcgagctgcttcaggccaataagattttcatgcgtcacatggagaagggttatctgcgagtcgtgaagaccgacatcaccagtgaccaccagcggatttccaaagagactcgcaccatggagcgcgatggattccagcctctggatgctactcgcctgcagcagaaaatcaaggtgaccacagccagcgcttcccaggaacaagagttccggatttaaccgagggtttcggcatggtgattttcgacgaaaataagtttcgcacgctgtttccggagtttgctgatccagccgcttatccggacgtgcgcctgcagatgtatttcgacattgcgtgcgaattcatttctgatcgcgattcgccataccggattctcaatggcaaagccctggaagcgtgcctgtatcttctgaccgcccacctcctgtcgctttccacgatgcaagttcagggcgcggctggaggtggcgtcactgccggtgggacccaaggcggtttcatcaccagcgctacggtcggcgaggtcagcgtggccaagctcgcgcccccggccaagaatggttggcagtggtggctgtccgggacgccttacggccaagagctttgggcgctcctcagcgtcaagtctgtgggcggattctatatcggcggccttccagagcgccgaggcttccggaaggttggagggacgttctggtgatccctggcgcgaatcttctgcgaatggccttcggggtcatcggcactcaaattgtgagatatcgcaagtttgagcagcgagtgaagaatgatcaagcccagtatgtctccatgttcggggagcctttcgacctggcagcgtctgtccagcgagtccgacgcgatcagtatgcccagtttaatctggagttccaacggaattatgttatgatcttcgccaactttgatatggttgacttggatcgcaatatggccggtgaccagttcctctggactggaagagtttttcagctggagtctcaaggctcctggttttatcaggacggctggggagtttgcctggccgtggatatcggtgcggccaagctcactgatgacgggaaaccgactttctaggtggtgtatgtttgacggcgaactgatagcgaaaatggttgtcgagctgaatgtggcgatggcatctgctcaagaggctttgcagttcccggattttgaagtcgtccagaaagctcagccgacccaacaggggacgtcaaccaggccgaccatctttttccagaaactgtttgacattcctcgcggctggcctgccaccgattggtacctggacaacacggcccgcaaatatgtggaaataactcgacagcatgtagagacgactttccagatcagttcccttcattggcagaatcctgaaatcactcacgtggttacggcttctgatatcgccaactatgtgagagcttatttccaagctcgatccacaattgagcgcgtaaaggaactggacttcctcattcttcgcgtgtctcaaatttccaacgaggcattcgagaacgacaatcaccagttcgaattccacccaagttttgacatggttgtaacttacaaccaatatattcgcctgtacgaaaacgcagcatattcggccgatggggtattgataggcatatgagtctgaggcgcgattcagagctaatcgccgcgcacctccagatgttaagagccatgcgcggcaggtccgtttcagccggatggtattccacggctcgatatcctgacaaggcaggcggatcggtcggaatacaagtcgcgagaatcgcacgtctcaatgagtacggcggaactatcgaccatccgggcgggaccaggtatattagggacgccattgttcggggccggtttgttggcgttcggttcgtcagaaacgactttccgggagaaaccgaggtaactaagcctcacagaattaccatcccggctagaccgtttatgcgatatgcttggaacttgttttccgcagatcgcgccgcaatccagaaccggatagccatgaggctggccagaggacagatcactccagatcaagctcttgcccagatcggcctggcattggaaggatacatagccagaagcatcaggaccgggccatgggtggctaactcagcatctacggtcaggagaaagggattcaacagaccgctggtcgatacggcgcacatgcttcaatcgattagcagcagagtaacataaccaggagatcatccagtgatcagtcagagccgttatatccggatcatttcgggcgtaggcgcaggcgctccggtcgcaggccgaaagctgattctgcgcgtcatgactaccaacaacgtcatcccgcccggaatcgtcatcgagttcgacaacgccaacgcagtcctgtcatacttcggcgcgcagtcggaagagtatcagcgggctgcggcttatttcaagttcatcagtaaaagcgtgaattcgccgtccagcatcagcttcgctcgctgggtaaacaccgccatcgcgccgatggttgttggtgacaatctgccgaagaccatcgccgatttcgccggcttctcagcaggggttctgaccatcatggtcggcgcggccgaacagaacattaccgccatcgatacgtccgccgcgacttctatggacaacgtggcgtcgatcatccagaccgaaatccgcaagaacgctgacccgcagctggcccaggctaccgttacctggaatcagaacaccaaccagttcaccttggtcggcgccaccattggtaccggcgtcctggccgtggcgaaatctgccgacccccaggacatgtccaccgccctcggctggtccacctccaacgtcgtcaacgtcgccggccaggctgccgatcttcccgacgcggccgttgccaagagcaccaatgtcagcaacaacttcggttcgttcctgttcgccggtgcgccgctcgacaatgaccagatcaaggccgtgtcggcctggaacgcggctcagaacaaccagttcatctacacggtcgctacttccctggcgaacctcggcactcttttcaccttggtgaatggcaacgccgggaccgccctgaacgtgctgtcggcgactgctgccaacgacttcgtggagcagtgccccagcgagattctggctgccaccaactacgatgagccgggcgcttcgcaaaactacatgtactaccaattccctggccgcaacatcactgtttccgacgataccgttgcgaacaccgtcgacaagagccggggcaactacatcggcgtcacccaggccaatggccagcaactcgcgttctaccagcgcggcattctgtgcggcggtccgaccgatgcggtggacatgaacgtctatgccaacgaaatctggctgaagtcggctatcgctcaagcgctcctggacctgttcctgaacgtcaatgcggtcccggcgagcagcactggcgaggcgatgaccctggcggtgctgcagccggttctggacaaggcgacagccaacggcacgttcacctacggcaaggaaatcagcgccgtccagcagcagtacatcacccaagtcaccggtgatcgccgcgcctggcgtcaagtccaaaccctgggttactggatcaacatcaccttctccagctataccaacagcaacactggcttgaccgagtggaaggccaactacacgctgatctattcgaagggcgatgccatccgcttcgtcgaaggatcggacgtgatgatctaatggtttgcggcggactcgatccgccgctaccttccataaatggagtgaggaataagcaatgatcaacatttctgcgttcggctcgatctgccagttcacggcaagcagaactttcccgaacggattcaccgtcaccgagttcgccgacgatgccgatcccatcgacagcccgccgttcaccgctgccgataccggcgtcggtctcaacggtgacatggtagtttggaaccgggcgaacatcctggaagtagtcgtcaacgtcattccgaataccgagggcgagcgcaacctggcagtcctgctggatgccaaccgcaccggaaaggacaagtcgggcgctcgtgatgtcgtcggtttggtagtggcgatgccggacggcagcaaaatcacctgcaccaacggcaccccaatcgacggcgttctgatcaacgcggtggcaagcgtcggccgtctgaagaccaagccgtatcggttccgatttgaaaaagtgatcaaagccggtactagctgatgaagaaaattccgctgacagcagtccccaatcaagcgatctcatttaacgccggtagcagctattggaagattcgcctgtaccagaacatggacatgatgaatgccgatatcagccgcgacggcgtgatcgtttgccatggggtccgctgcttcggcgggattcctcttctccaatacagccatcagtaccgacctgactatggcaatttcgtcttcgaccgcgacgccgattggacattgttcggcgacggcatcaacctgttctatctggacggcgccgaattcgccgagtatcaggcgcttgccacgaggaaagaatgagcacatcaacgatcagaaccgggacgaacaacgatatccttttggacgacaatggaaacatggttatcctcagggatgtcgaagcgtgcgcccaggacgttcgggcggcgatgctcatgcgcaccggcgaaaacattttcgatgtgaactccggtgtgggatatttcgaatacatcttctcgccgcagaaaagctatgatgacgctcgcaaatccatcgcggatgcaattttatcctcgccggatgtgaccggcatcgagcagcttgacatcgacataaccggggaagtcttcggcgtcgatgcgaaagtcatcaccatccacgggcctgttaccacaggagtttgaaatgagtaccatccgcatccaatacgccaacggcacccaactgttcctggacggcaaaaatccgccgcccctggacccgctgccctcgtttaacccgtctgtcgaagatctggaaggcctggaccgcgaaaagaacaccgacaagggcgactcctcgccggccggtcttcccgttcccccggtaaacgtcgattccaatgtcgacaacggcggaaccatcccggctccggtatcgaccgacgctcctgcggccgaatcggccccggaaggcgcccaggaagctcctgcagcgggccaaggcgacgagaaaggcgctgaggaagccccgactaccgccccagtagaaaaggccgaggaaacggcctcgccggccgctgaagaggaagccccggctcccgccaaggccacctctcgcaaaaccaccagcaagtaaggactcgacatgatcaacgtcagcggcttcggcacaggaattgtaatagtttccgcctcatcgttcccgatggggttttccttgtcgaagttcgctgatgatgagagtccgatatcctccaaagagctggagccgttcggatatgagatgctttatgacggcggcctattcgcctttgacaaggctgctcctctggaagtatctgtatccgtcatcgcagggagcgaggatgatattaaccttcgcatccttctcaattccaaaaagggatcattccgatttcttccgggcatcatcccggatatgacgactctcgtggccactcttcctgatggcggccgcaccgttctgtccaatgggactatcatcaagggtccggccatcgacaccatacagaacaacggacgacgcaaaggcaacacgtacacttttgttttcggtagctatcttggcgcccagactgcgcgtcaagccatttctaacgttatccaatcggtactggaggtggtctgatgttggggattttcaccagcctcctaagttcgcgatctttttcgattgtggaccaaaacacaaaccagctagttgctgcggatttgaggataagccgggccaacacccggttttcttctgtagggcaacgccacatgctggaagatggtacgaccaagatggattccagaacgatccaccctatggaaatcatcgtcgaagtattttgcccttcaattgatgtcgtcgatcagatcaatcaattgctcctggatcgcgacacactgtacaaagtcatcactcgcggcatggtattcgaacggatgatgtgtaccagcgaagcgctcaatcagactccggatatgatatcggcgactcctgcgcggctgacattctcccaagttctcgtccagaatcccaagcctataatgttcagaaatgcaggggactcttctatgatcgaccgagggctggccctagctgaagacgtggttggctcggccggcgatctgttcgactacgcagtgaacggcgtccagaacgccgcagacttgttctgaggtgccaattgaactctttcctcaagtctattctcaacacgcctactctcaccatacgcgatgatgtcaccaaacttcctgtctggaagagtcttcaagtcaagaaagtggaaatttactcgccggcttccgtagtgtcgaaacctctggcgacgaaagaccagacggaagctcaagtgtacaccgaagctctggacattgatgtgaagaatggaaagatcatccaaccggtgcgactccgcatcaatgctatctgtccggacctgtccaccgttgaaagtatcatgaacgccttcaatgataacacctcgactttcgctatcacttctaagtcgatattggccgataaaatggccatcatggcgctcgatgtagatcagtctccagacatgttgaacgcggctgagatcaatatggaattcgagcaggttgagcctccagtattgaataaattcgatcctgcgttccctcaagatagtccgacttatggggtacagattcaatctctttctgatgctaatttgctggatttgggcgccatcggcgattcgatatcttcggccgcaaaatcgctatataatcgcgtgaccagctacttctgaggatgtatcatgcttgaaatcaatcttcccgatggccgtcaaactcgcgtacaaatcgaggcgtggtcggcattggatggctgggaactccagcgccgtttcgtcgaattcgctgtcagccaagattccgacttccgccgctctttcaccatggaaatcctgggctatgcgaaagtgctgcttggcgacgatgacaccggcattccgctgaccaccgcggcagtcatcaacaaccacctcggccactggaagaacgtggaactggttttcaactctgttctcaagcacaatggcatcgacccggccacgcacgccgaccggccggactattgggaacaagtcggatcgcagatggccatcgcatttctggccgaggcgtccaagctcattggtccagcaatgaagatcgccgaaggactcgccaacaagccggagtgattcatgtctagtgatttggatgaattcatacttcggtatgaggccgatactgccagagccgagcgcaatctggagcgcctccagaaccagatcaggcgcgtgaacagcgcatcgacgagtggccttcaggatttgcgccacttcgcagacggcgcggccactgaactcggccgagtcgttccgcagatcgattctgtgacgagcgcgattcgcgggatgaacgcgcaactggcgataggcgccactggcgtggccctggtcgcggccggcgtcaaggcgttcatgaacaccagggaccagtacaatcagcagcgcatccaggcgatggacatcggcatcgccccggcacgcttggaagagtaccagagaaaattcgttcgccagtccggtggaaccatcagccgcgagcagggcgcggagatgaccaaaaatctggcagacactttccggcgtgcttatcgcgatatcgggcgagtcggcccggaagcgcgaattctgcgtatggccggcgttgatgtcgggagcttccaaaagggcatgcggccgctcaacgacatcattactgatctggccacgaaaatggccaagctgaagccggacgaaatttctgcctacgctgatgcccttggcgtctcgcgagactacctgagcaccctggctaagatcggcccggccatgggaaaagtcaccgagatgacgactgcggaactccagtccagggtccagggcgagtccaacattcagaaattcaacgatgctctggcgaatctcaaccagacgttcaccaccctggaaaaccgagtcggcgaaaagctcgcgcctgcgttcaccaagctgatcgaaatcatcgacaagatagtccaggctattcccaatgaagtggaaagcttcgcgaaggacaccaaatcccgttgggaagatggagtgctcgggaaggcgaccgttggcagtgatatcctatccctcctcagccccggcgccctgctcggtcgcctggcagcgtgggggactcgtcgcggcatggaagaatcagggctcatcgacaaggacaaggttcccggcgctcaaaccagcgaagacctggccaagaaacaagaagaccaggacaaggctactaagtccatgaaagagctagagaagctggctgaccagaccacgaagtctaccaatgattttgcggtggcgatcaacatgttcagtggcgcggtatcgtcgttcgcgaatgccgttgacgagcgccaagcttgggcagcctgggcgggggaaattggtcgggcggtcggtatgggaagcaccgcgccgacttcgcgggcaaccggcgtctatccgcacgcgatctatgatcagtcgaagagtggcgcggccggacaagtcttcggcgagccaatcggcgcccagtctcttcgcaatcgcatgttctcgccgcagcgcaaggcagagccggtcaccgttccatcgtacatcaacgatatcatcaaagatgcttcgaagatgtacaacattcctgagctggacatcaagaaactcatatacaccgaaagccgattcaacgccagggccaccagcgaagccggagcgaaaggcctcatgcaactgatgccggaaatcgccaaggcgtatggtatcactgacgtatatgaccctcgccagaacatcctcggcggaacgcgcctactgcgtgaaaacctagatcgagcaaatggcgacatgcggttggccttgacatactatcatggcggactcgatccgaagaactggggcccaaggactcgcgcatatccgggtttggtaatgagcgctccaatcgagctgatggaagaggctcagcgcaagcagaaggctgcggccatgaccgtcgccaacgagacgttcgccccggaaggcggcgacatggacattcgtccctatgatggcgggcgactggaaaccccagaccagggcaagaaggaagatgagcgccgcgaagcccgtcgatatgacgacagggttgtgcgaccggaaattcgcatcatcgaccgcatgccagaccgcagcgacggcgaaatcctcaagatgtctagacgtcaagaggccgaccgggcagattctggattccggaagttcccgaatcaagttcgcggcgagaccaagcagaacatccaggctcaactcactgcaggagccatcgcgcaagtgatcggcgttaaccccaaccagatcatgcgccgcgaaatcagccgttctgacttactgttcggatacaaccaagccatcctgggcaagcaacaggagatcaaggccgccgcgaccgaagccaacaacgtattcctgtctccagccaagcttgccgaagccacggccaaggtgaacgccgcatcgcgagaaatggatattctcaggacgtacggcgagcaacttctgaagagcgctccagagcgcggccaggagctgaccatcggtcggatcgacatgttggtcaacgtcaccggcgcgaattctccggaagaggctcgtgagatattcagcaagcagactgcagaccagctgactacggcaatccaggacgctcaaaacgattccgcaactaagatactctactgatgaaaaagagaattctgcgagtaacattcaacatgccttatggacccgaagtcatccgcgaagatctggatgttcgggtccggattatgaaggctgcgttgcggattcagaaccgggcgacgatggaaattttcggcctcaccactcagctgcgcgagtctcttctgtcgcagttcaccgcgtggaagcaccggcaacgtcaagtgggcagggaagatgaattgatgatcaaggtgtcggtggaagccggctactctgaccaggggcgcgagcaagtttccagagtctttgtcggcgaagttgccattgtcgatatcatttctccgccacctgacattggaatccgcatccagtgctataccaggcaaatcgacaggacgaagaccattcggaatatgccgcccgccaacacgacgtttgtcaagttcgtcgagtggggcgcgaacgaaatgggattgaacttcatctgcgataccagttacaacgatcaagttctgaagaatccgggccggtctatcactgtcgcgtcggcaatcctggcgtcgattcaggatatgtacatgccggacgtggccgcgttcgtcgatgatgacatattgatcgtgaaggaccgcgataaagtcattcgtccggatgaggtgaccaacgtcaactcgtttgttggaattccatcttggtctgaatggggcgtggaattccagtgtctgtttgagccatcgattcgtgtggctggaggcgtagcggtcgaatctctcatgaatccaagtgttaatggtaactatgtaataactgctctggaatacgatttggccagtcgggatcggccgttctatatcaaagtcatggggagtccagcagcataatggccagggaaatcaaatcattcaacatgttcggagttcactatacttcgcggcaattctctgctgtcgatgggctcagcatgatgtcggaaattcagaacgtgccgccagaagaattgctcaagggtactgatgtattggcgcatccggaagaccatccggaaggcatctggcttccattgactgctgcgaacatcaatctttatgtcgttgatcgagcgaaagtaatagctcccgtacaagttcttgcacttctgtccgaagtggtaatcgactggaactttggttttctcaaagactggaccggagtcaagattccatccagatttgtcgaagatatcaaaagcgtgaagacggcacattcaccttctgtagttgcgagcttggtcgcgaacggctcagcctctatgcgcgagttggaagagtattattcgactcaagatgcgtttaagatgatagatatcatgacggcgaagagcgtgaacgaggccttggcgtccgaagcatcgcacaacagaatcaaaaaggataattcctaaccgggcctgggaaggctatactagacctgccaaatcagaggctttcccatgtccaatatttctctaacatcagcaaaagctcccgacaggacgcgactgatcgccgctcttgacgctcggtcgcggcgggatgctctagatttcgaagtaatgataccggctcaggttgttcaatatgacagggccgagaatatcgcaacgattcaacctctcatcacctgggttgacacggaacacaacgccgtccaaaggcatcagctggttgatattcctgtaatttccatgggggctggcggattccacataagtttcccgattcagcaaggtgacataggctggatttatgcggccgaccgcgacacatctcagttcctggagtcgttgtcaatgtcgaagccgaacaccggccgcatccataagttcgagcatggcctgttcatcccggacgtattccgtcgatacaccatcaattccgaagattcggccgctatggtcatacaatcgacttccggagcgaccagaatttcgattcgcggcgataacatcaagataactgcgccgtcgaacgttactgtggatactccgcaggcgaacttcaccggcaatgtgactatcgctaacaccctggtcgtaaacggcatcaacgtgaacaaccacggccacctcgaaaacaacccgcctgatgcccggacgaaaggcggcatgattgcttaaggagattttcatggcaagttttgatttttctgatttaacagcgggggggggttgtaatggctaactacaactacatcgtcgatactggtgtgatagtcgcagataccgccgacgttctgagcgacgttgaggccgagttccgcgccgccctcggtgccaatatcaacttggccgcgagcactccgcagggatcgcttgtcgcggccgaggccatcgcccgttccagtgtcatgcggaatgaagcgcgaattgccaataccataaacccgaacgtttcattcggaacgttcctggacgcgatctgtgccttgatggggatcgagcgcggttctgatctgtcaaccttcggctatggagttcaagtcaccggccgcagccaaacccgcatttccaccgggtctagggtccagactccggccggtgcgatcttcacagtgatgagcgatgtcacgatccctgctggtggtgtcgcgaccatcgatatcaaatcgcaggagtatggcaacattcctctgccggtcgggaatctcatcatcatcgacggaacaattggatggtccggagcaaaagtcatcgcctccactcgcgtcgatccgggcagccgccaaatgagcgatgcagagttgaagaatgcccgcgttaatcgattggccatccaaggccgcaactcgactatggccatcaaggcgtatgtgagcgccgttccaaacgtcacgtcggtgaacgtaatcgagaacaacaccggcgccgttcaagtggtgaatggagtctcgtttacccttccgtatgctgtttgggtctgcgtcgccggaaacccggataaacaagcagtcgccgatgcgttgtgggccgctcataacggcggaactccatgggactatggtgcgacgaacaacggcgtcccggtggacggtccgaatggcgttcctgtgcgcgatccggcgtccggtcgaaagtatgtcgtgaagtggaccactccaattatgtacgatggatatgttaacgtaacagtccagcaaggttcctcctctgtagctccggaagccattcagaacgcagtggtcaattacgcccaggggaaagtggaaggggaagaggggctggtggttggcgcgagcctgtcggcattcgaagtcgccggcgccatcgctcgcgaaattcccggcatctacatcaaactctgccaggtcgcgtgcgtcgcggctggctcgccggctccggctccgggcgatttcacttcggaatacgtcatgagcgcattcggccaggctaccatttccgttggtaacgttcgggtgactttcgtatgactctgcctgcgtacaattcggacatccaacaagctctgaaatggctccataaccaggcgcctggaatcaccggcctgatccagagaaaggcgcaatggtatgacagattcagccgccaattctgggccaactgggagcgcgacgttttcaacttgaagaccgccaacccgttcggccttatggtttggtgcatcatcctcggcacgccttcgaaagggttcggcctttatccaaaaaacagttcttgggcattcggtcggctacgccagaacttcatctatagcggtacacaagtcccgccaccggcagacgcatcgcctggcggcaacttctacggtggcggcaatgccgaaattctcaacttggacgaaatcaggaaagtgcttcagctaagatatgtagcgctgatttcgaacggctcgattgcatatatcaatcgcatgcttcggtatatcttcaacgatgatgagccgtgggacgaggcggccgggttgtacttctacctcatggactcgaccggcgagaatggtcctgtggaggatttggccgtatatcggaaagattgggaagggatggttttattgtctagctcgcccaggacgaaccatgtgctgatatcgactcctgccagcgacgccgattggccaggagtcgatccggccgcgagcggaattccggtaacggtcgaaacggcgtccgctacggccccggacggctccgctacggtgtgcaagcttactaagccggccgggagtaccgcttacgtctccgcgccgatagatgggacgctggggtccggtagcactgtcacgttctcgttcttcgcgaaagccggctccacccgtttcattgcaattcagtcggctgccgatttccccagtcgagccgatgccgttttcgacctggattccgggaacgtaatcagcgatcagatgctggacagcagcgtggtaagcgcccgaatgattcgtctggaaaatggctggtggcgctgcgttctcacgaccaagaccgtcagctcttcgttccgcgcggcttacatcgctccggcagaaaccaacttcagctggattgattcgaattccagcgcggcgattgatgtgcttatctggggcgctcagatcgaactgggtgatgctccaaccggatacttggagactaccggaacgcccgtaaccatcaccgattacgttttgcagagcgcccagaccggaacggtcaagttcacacagcctcttccgaccggagtagaggcgtattggactggagactggaaaggtgggtctgcgaccgagccggccagattcgcagtaggggatgggactcaagatacattcaatctgtccagccctgcatacatcggcctacccactagtggggcgttcaagctagaatacagagttggtccggcgcttaatttgtcgccgcaattgatcaacctcatgaatgaccgggcggtcggtatcatgccgacttgcgccggttgcgatgtaaaagtcattcaggagtaatgacgtgatcacacccgaactgatacccagtccgtttgctgcgcagggcgacaaagacccgatcccgcaaacctcttccactggctttgccaaccttcgcgacggctacacgccggactacgaaatcagtctggcgtcgaacaacccgcaggccaaagcggtcgagcggaaaattcaaaaccaactcttcttcatcgcgacccagaacgcacaggcgtggcagcggcaaatggcgccgccgtggtttcagggcatgcctggcggctacgaacagaatgcagaagtcgtgcgagtcggcaatgacggcataatgcggcgttatcgttccatggtgaatgccaacgcgagcgaccctctcagcagcacgacttgggaagaacaacccgcatggtcggtgatgcgctccaacataccgatgccagctggaggcccaggcctatcttctggcggagaagtcatcacgaccggccgcaacttcaatgacctgttgaatgggacgtgggagttcttctctgattcagtggtcgtcgcttctcagaacgcccccgtatatcccgcttcggctggtgcagcagctggaatgttggaggcgaaatcctggatatccgggtccaatacattctgcgttcaacgctacactgaccgcgtcgggaacgtcgctgtgcgcgggcttaatgccggggcctggaccaactggatgtacgcagtaaatgtcatggccctccaacaaggtcgggtcacctatggagtcgcggccggatcggcgaacgcttacacgttgacgctagttccgcagctccaaggcggcctggtggatggcatgattcttcgggtcaagttcaacaccatgaacaccggcgcctccaccatcaacgtctccggactcggcgccaaagccatcgtcggcgcggccaacttccctctcaccggcggcgaacttggccaaggactcatcgctgagcttgtattcgacgcagcaggcgaccgctggagaatcctcgcaggcgcgccacgcatccaagttggcaacgccgatcaagattaccaggcccccagctggaaacaggtgaaggattacgtcgcgtcccaaaagctgactgaagtggactgggctgacgtcgtcaacaagccgaacgtcgctatccaagacaccacgccgtggttcgccaatctggagctgtccgatgctcggcctttcatcgatttccacttcaacagcaatcgcgccaaagacttcgactatcggctgatatccgaagcggacggatcgctggctttctattcgcggcaggggtctgctgggcctacccaggacatcctgttcaaccgaaattccgtgactttcttccagccgcgactcgatgtggcgaaaaacctcgcgtacatcgcgaactctggccccctttggcagaacaccaccgccgatcagcccggttggaaattcacctttgcacaaggcgtggacgcgaacaacaacgcggtgatcgcagtcaataccaccaatccggacggttcctatcgttcacaggtcatgcgatgggactgggcgtccacgaacgtcatattcaacaaccgtccgctcttcgccggtcaatacaccccttgggattctgggaacttcgatccttccaccaagttgacggtgaatgccacgaaccaaatcgccggcccaaccgggattcggaataccaacggcaacaccggcaacatgaacacctggggttccggctccacgacggcatcctatggcaatgctgccattcaaatcttcggaaaagggggtggtgagcctgccgcgatctatttcgacaactcccagaccggatggtatctgggcatggacaaggatggacagctcaagcgggccggctggtcgctcggcaataactcctatgtgatcaccgacgaatccaacatccgaacccatatcaacacaatggctgcgcgcccgatttgggggaatgtcgagttctggggtccgtggaacttcaatccgaacactaagcttacgttgggcgcattcaacgatagccaatacaccaggatggtaaacagcgccgcgaaggacgtagggatagccgccatgacaagttatggcgacgcggctatgtcgttcttcaactatgaggcttcgacgccgaccgggaatcgtgctgctgtaatttcgtttgttcgtaacggggcacgaggcgttctgttcggcctggacacggacaacaagctgaaatggggcggctattctctaggtgccgtcgcgttcgagattgccgactccaacaacctcatgagcctgtggtcatcccacgctgccgcgccgaactggaacgggcagaccatctggaggtcgggaaacttcaacccagacaccaaggcgactttggcagctcgcaatacgacgtcatcccctacaatattcagttatggggcgtccggaatcgcatcaaccggacaggtcggtgcgttggttgtggaaaacaacagcgtcaccaataccgcagccgccatcacgttccattcgccgcaaaaatatcaggtcaacttcggcctggatgcggacaacgtggtaaagatcggtggcggcacaatgggcggcgtagcatatcccatcatccacgccgggaactacaataactacatcaaccaggcgctggttcaggtgggtcttggcggagtcggttcctatgcgatccttgcagtatttgacacctccgcgccggcagcgtccattgcccccggaacgatcatggacagttccaagctgttctattcgtcctgcgattcgacctatcgcagcagcgcccgtccgacgggcacctggcgctgcatggggtatgtgtataaccgagactccaccaacggcgactcggcatccctattccagcgggtaacgtaacatgaaatggacgcggatcagaaacccacgttggctggacgcggtaaacatccacgccatggttactttcgaggggattggagaagttcctttcaccgccaatccgcacgacgtggaggcccacggaagggccattcacgctgcgatcctgtccggggcgcacggacctatcgccccagtagactcgacgcgggagcaggccttgcaggacgctatacgagacagggaaaagcgggctatccttcgcgatacccgatggcccatagatcgtcacgacgagcagaggcggctgggtatcgaaaccacggacgggcctgggttgatagcagcccttgttcactggaggcagcagattcgcgattggaatagcggggatcggccgcgacttcccatggctctgaaaacgatgttcaaaaatcaggagtattgatgaaaatcacgaaggatgttctgatcaccgggaccgggtgcaccacggatcgggcgatcaagtggctggatgatgtacaggcggccatggacaagttccacatcgagtcaccgcgagccatcgcggcctacctcgccaacatcggcgtcgagtccggcggactggtaagtctggtggagaatctcaactacagcgcccaagggttggccaacacctggccgcgccggtacgcagtagacccgcgagtccgcccgtatgtcccgaatgctctggcgaaccgcctggcccgtaacccggttgccatcgccaacaacgtgtacgcggatcgtatgggtaatggctgtgagcaggatggtgacggttggaagtatcgcgggcgcggcctgatccagctgaccgggaagtcgaactattcactgttcgccgaagactccggcatggacgttctggagaagccggagcttctggaaactccggccggcgcgtcgatgtcttcggcctggttcttctggcgcaatcgctgtatccccatggcggagtccaacaacttctccatggtcgttaaaaccatcaatggcgccgcgccgaacgatgcgaaccacggccagctccggatcaaccgctacctgaagaccatcgccgcgatcaatcaaggctcctgacattcgcccaaagaaaaggccgcttattcagcggcctttttgctttccggctttgcctcttcaaccatcttgacttcaaccggcgcggcggactcttcctgagtgaccgaatccacatagttccctagtgaactcagaacgccgattaacagcgctcttactaccttgtccttgactgtctcgcctatgatcttggtcagaacggatatcaactcttcccggagtcttgggctgattcttggccgaaagcgcttgcgatgctctttgcgtttcatgtttagtcctctgtctgcggtcttctcctcaccccgataatggcttggggatgcgctgtgttagtcggaagggtcgggcgttattataactcgacgaaaatgctcgcgcttaactgtttaacgatacgcaccgcgatattaaatcgccttctttctggccaaggaactctggcggccgggtccggtctaaggcctaatttgtcgacattaaaacgagaaaacccggatcacctgtagggcaaggcgtccgggtttatttctatctagtgtacgctaggatcagtgacttccgccccacccgtccagccagcaatcgaagacggcgtgcctcggcttgtccttggcgccatgggagaagtgcttgaaccggatgacctggcccttgagatactccctgtcattccagcggcgctgtttctcgtcgtgggtcaggctggaggccgacacgttgaaggtgactccaggccacagacgttcgttgcggcagacgaacgcaccgaccattccggacggcgacaggttttctgcgtggctggagcgggccgtgtggccaagttcattgatgaaagcttcattgttgttgtgcatcaactcttccacgtcgatgatctcagcttcatcgtagtcgtatcgcttgactttcacacagtgcccttccttggcagtcgagcgaccgaacttgtacagtccatcagcgcgcttgcccatggaaccttcgaatcccagcattgtgtggcggcgctcgacttcgctgaactgttcgatggaagtcaccagttcctgctcgaccaggtgaatcctctcatagccgaggcagtgacgaaggaagttcacgcgctcggccgccctggctaggcgatcttcggtcggtgcgcgaggatcggtgaaatcatcgaacacatggaaagaccagtccggctcaccgctgtggcggcgaagatcgccggacgacttctggaaaactttcgggtcgctgatgtcgccgcagaccagctcgccgtccaggccgttgaacagtttatcgctgaggtattcgtagatcgattgattgttctgccgcttgagttgacgagtcagcgcctcgccttcgaatacgaagcagcgaaatccatcgatcttcggcgagaaatacatcggcagttggccttccagcagcttcgggtcaaaattcgatgcgagcatgggtttcatacagttctccagaaaagaagcccggcgaaccgggctaaatggcggtaagccggctcagatggtttcgttggcatagttcagttcggccatgatcgacgcatagcgctcgtccgactccttgatgaaaacgccgtcgtacatgacgcctttgcgatccttgatggtgtcgtaggctgcagcgtagcagtcgagcatggtggtgtcgtgctcttccgtcacgtcgaacagagtcatggcggccgataccaggctcttgatggccaacccatgatttccacgtgccagagcgcctgccagatcgccgaggcgctgcaaatcgtcgccgtaggtgggatgtacttcgccgctctcgatgaaggccgacagatgatcgaacagattttcgccgagttgcgcggccatgatcgtggcaaccaccattacgtcgccgatgccatctttcacatcgaccgggttgttctgaacccaggcttcgcatacttctgcgaactcttcgaccaacttcaggaattgatctttcgcagacgagcctttgatcaggttacggtcggaagcccatttaaccaccaggtcgtgaagttcgcggctcatgatttgttcgatgttcattctttcgattccttctgtatttgggatttgactgcattgatgatggacgccgtgctctggcgcgatccatccttggtggtaccgaagtagaaggccattaccgacttcagctcggcgaaccaatagccgatgatggtgccgatggcgaccgaggatgtcgggtccatcagagcctcgcggccgaatgtgaagattgcgatgatgatgagaatggagcctgtcagaagagcgaatgtaatcgccgggcgaacgaaatcgttctgctgcgcagcaagcctcctcgccgaatccctgtctgccgcctctgcggcgaactggctaagctcggcctggagctggttctgctcagactgaaggcgattttgttcggcttgaatcgcaagctcctggagacgaacgcgctcggcgctctggagttcggcgagacgcgctagagcttccggattcgcgtctagagcgctagcgaccgaggctgggtcggccttcgaccccagcgccgtcgcgacgatagcgccaacggcggcgcctgcaggcccacccaggagcgaccccagagccggggcagccgcgccgatcttactacctatgtctttccagtccatttcgactcctcaaaagaaaggcgccattacagcgcctttctccggccggtgatttagaactcttcggcttcggtcgcatcgccgacgccaccggcgtcactgcgaggctgttcctgcttgctgtagtccaccttcacctcgccgcctacgaacgacttgtacaggtcggccgcagccttgaagtgatccgggttcttcaccaggccttccagctcgaactggacgccggaccagctgcccttgtcgttcgacatgcctacggtggtcatacggaccaggttggcgaaagtcggcggggtgcgcaggccctgcggggtctgaacctttttctgggacagcgcggtcatgagcttcttcgaggccttgatctgcgaagacgacagggagatcagagcctggccgaaatcgccggtgtccggatcgatgacgatgacgtaatgaccacgggtgtcggcgaagtagtcagacttcttgtcgctgaccgaaccgtcttcgttcggcgcgtacaggcgtccttcgacttccttcaccttggtcgggtctttcatcatttccttgaagtcttcgacgctgatggcacccttgaaaccgccctcggcctcgcgaccggcccagcggatgaactcgcggcggtacgcggccggaatgatcagcaggccggtcttgccgtcgtaaaccttgccggtgacggtgttcaggaacatgccggccttcgcgccttcgatgtacttcgggtcatcttcatcgacctggggagacatcttctgcaaaacctggatgaaggggatggcataggactcggcatcggcgccttcgaagcctgcgccgtcatacgatcccaaatccatgaagtcgggaacttcggtagtcgcgacggcgccgccaccggtggcaattgctacggccttggtttcttcggttgcttcggaagtttcggttttcttaccagccatgttaggctccttgtttgtcgaatttcagttatcgctaactgtgggtttataataacggaagttgcaactaagtaaagcaaattacatatcaagatttgctctttttcaccttcggtttcgtgatcttggcctctttgtattcgtgtacgccgatgaaatctggcagctcttcgcccttctccaggtactcgcgaccgaacgcctggagggtctggtaatggacatcgcggttgatggtggcgtcatagccggcttcgatgatggcctcggccgccttcttcgcatcttccatttcgccgcgaccgaattcggccagaaccttggtcttgatgatgccgtcgttgtcggtgtcttccagccacttccagaacttcgatttgttctcttccttgacggaaatgatggccttcggctctacttttaccgtgcgaccgtccgccagagtagtggtcttttgaccaagctcctccagcagctccggaatggtgttgcgcttgagggttttcagctcctcttccttttcggccagcgccttttgaagatcgaggatttcgacgtccagctgcgaagccttgtccaccaggttcagcagtcgatggccgatgtcggtggcttcaaccgccatttcatccatgacgccaaaatagtcgatttcgcccggcgcgttctctttcaagtattccgggatttcaagctcttgctctttcatgtccgcctccaacttagtgatgttcccttacttgaaccaagtattgagtagatattatgccgcatcttccttgatacggctactgatttacatattaaatttcgtcgcgagtgctaacgtcagcctcaaacacgccatcaacgacataacttgccaggttgcgtttccactccaagctgacctggattttctcgtcgatggaatccagacagatcaggtcgaagtacagaaccgagttgacggtgccgattcgatgatttcggtcttcggactgcatccgcagctcgttgtcttcgtcggtcgtgtagtagatggccacgtctgcggccgtgagcgtgatcccgatccctgctgcggccgggttgcccaggaacacctggacgcgcttggcctggaaatcgtcgatcaatttttcccgctcggcctctttggtctcgccgtagtatgtgccaaacgaaattccttgggcctccagatacgccttgatctggtcgatttcctgaatgcgcatggcccagatgatgatggagcgctcctggtcttcctccagcagaccctccagaagatcagtaaacacggcgaatcgcgggttgtcttcgggcggcaggatcaccggctcaccatagacgttgatatagccggacgcaacttgcttgagcttcgaacgcgctgccgcagcatcgaaagatacatccagcatgaaatcttcgttctggagaacgaagtgatagtcttcttccacgcgctgataaacctttcgttgctccggcgacatttcgaagtatatgcgcttgtacaccttgtccggcaggaatggcaatgcttccttcttcgtgacccggaagctgtgcggctcgatcagggatcgcagcttgtccaggttccggaataccgggcgcccataatcgtctttttcgacgagttgcggcggcatggtttgcttcccttccagcttgcgcatgatagcgatcattcgaggatcgtcactgggcaccaagacggaaaattcggccacaaacgcccgataggatttagtccccagaattccattccgcaagaattggaactgcatgaacaaatcggtcggtgcccgcgtcagaggagttccggaaaggatgcgacgggccacggccttctcgcccagctttactatctttttcgcacgcttggcttgtgggtttttgatcctcgttgactcgtccacaattgcgcaaactttgaatgtatcaaggaatcgctcgacctcatcatagccagcctggtggttgattgcgtcaacgttgatggcgaagacgcgaagaactttttcatctgcgaacgtctcggaatacagacggtccaagcgcgccctggcctttttggaagtcggtcggccgcgccaatccacgctcaaagtcttgatcgcgacgtgggtgggaatctcgcgcagaatccagttggtgtggacgcctttgggggcgacgatgagcagcgcgtccacgcgcccctgtaggaagaggcgaacggcatcggccaaagtcgtccaagtcttcccggtgccctgctccatcaggtatgcgaagttccgtttgttcagggacgctgccagggcattgaattggtgctgcatggcctcggtcttcatgcccttgacgggatatgttttggctttcatttgttctccaaatcggcgaggaactgaacaatgttatccagtccttctgcatagctcgcaacttccaccaagtcgcggctgttaagctcgaacaaatcgaacataggattcagcagcagccaatcggttccgatcttggccaggacgaagccccggccaccccagccgatccgctcccgaagaaaagggatttgcccaggttcgaaacatctggccattgggcaggtggaagcgcgtttcggccactcctccaaagccttgaactcgacccagaactggacgcctcgacgattcaggcagatcgaatcggacatgccagaccgccgcgtctccagaaagtcgatcaggattcggccgagcgagcgctgcttaaacgcattcgccgctttcgtttcgcgatcattcatcaccttcgccctctttggaaactttctctgcttgcgctgccaactttgacttctcgcgctcggtcaatatccgcttgacggccttcacgatgaacatgtcgatgccgctgagcctccatcctttgatcaggaaccaagcgccggtcggcgtcccttcagcaatctgctttccgtattgcagatatttttcaggccgaattctgaaacgtatcggctgatcaaccgagtcatcaacacacatgatgtcgagaaactgcgactggcccttgtacaccgggtttttcccttgatcagccctcttcttctggcgaatcggttcgttctcatcagacagaacttttttcaccatcttgacaatgaccagaccatcatctccatcgcggatatcccgaatgttctgaatggggtttccggaagttactccaaccagctccggattgtcataagcatgaccccagagcgtgtgagcttcgttcaaatctgcgaattgaacttcagaattcgacagactcgcggcgactttctcccaatcctgaagcgtcttcaggtgggtgcctgccagctctttatattgagccttcaactccttcagatcggccttcaactccttcagatcggccttcaacagtttctccagttctttgtcttggctgattttcgccgaaagaatctgggcttccagagctgctacatcagcagccttgtcctcaacatcctgtgccgatatcgggcaattggccagggcgatcctcgcggccttgacttcctcacgaagacgcaggaaccgctcggccttcgccgggccgaagcctttggcgttcatgatgccgccgatcaggcgcccgtccgccaccacccagttgagttcggaatgctccgggtccagggccgtatattctacgccttctttggccaattcgcgaaggatagacacagtttgctggtcgtccttcgccgcccgaaggcacgcggccgcgtattccaggcgatgataccgcttcatgtagcaagtccagtatgtcaccacggcatagcttaccgagtgggagcggttgaatccccaggcgccgaatgtcaccatttcctgccaaactcggtgagcgtcttccggggcgacgcctatggtcttggcgccctcgatgaacaattctcggcgcttgttgaagaactcttcgcccttccgcgccgacatcgctttccggatcgccgacgtttgttcccagtcgaactgaccaatgtccttaacaattgacatgatctgttcttggtacaggaacacgccatacgtccccgacaaatactgctcgacctgcggaatggtataggtcacaggctcgcggccggccacgcgctcgatatacttggttgccataccagaagacaacggacccggacgggcgagcgccgtgatgtggtcgatgttctcgaacgcggtgatgttgatcgcgtttgctaccgagcgaacggcctgcccttcgaactggaagatgccggacattttgtcttcattgagaacgtccagaaccgccttgtcgttcaaaggcaagtcgtacaactcttgcgcggtcacgcagttcgcgtcctggatgactcccaaagttcgaagtccaagcgcgtcaattttgaggagattcagatattccgaatcgggcttgtcgagctgcgcaacgccttcggaagtcaccgtacagaagtcgatgacttcatcgttgcagaccaggatgcctgccgcgtggacgccagagtgggatgggtgaatttcgaggtcgcccatgcaggcggacgcgatctcatacttttcacggaagtcgcggccgggctgagttttttcgaaagtgtcctccaatccttttccatatcgttcgtccgctgatgtatattcgatgatcgagtttttgatgttgtcggtatcgtggaaggggatgccgaagcgctttccgacgtgagcgataaccgacgcggccttgagtgtgttgatgttacccaacttcacaacgttccaagtgccatacttctgctggagatattcgaacactagatagcgatgggtatcggcgaagtcgatatctatatcgggaagatcggaacgggaaatgtcgataaagcgctggaagagaaggcgatgcgggagcgggtcaacctcggtaatgcccaggaggtagcagaccaaagagccggctgaagagccgcgagccgggccgaccagcatatgcttcttggcgaacgcaaccagatcggcgaccaccagaaagtagctgtcgaagtctttcagctgaatctgcttgatctcttcttggaatcgatcctcatactcctgggtccattccttgatgtggccgcgactgaggcggtaggcttgcccctcgcgagccagagcgacgatatcaccatccaagtggatcatcggcgccttcgccagtttcacatccgccaactgctcgactaccgcacgagtattggcggcggcggcatcgaactcttcgcgagtcatgatgtggcgtaaacggctccacaactcctcttcggtggcgatgtggcgaaggccgaccgattcccgcaccttccaggccgacgcgaaatcagcatggtcgatggacggcatgtcgttgtaagaggtaatcaccaccggctttccgaatgctctggacgtctccatagcaccgtgcgcggcgaccatcgacgcgggattgatgtcaatgtagtcgattccggccagatccagatgggcataggcctcgccagcgaatttgatgacgccgtcagcttcctggaattcttgcggagtcaatccttgattctggaccgacttggaagtcaagcggtagaacttcttagtttccttggcaagcacccaggctttgagcttcagctctttttcgccgtcgtcggcgcatttgatcggaatttccatgccgaatccgcgaggcagttctgctttggtagcagcctgctcccaacggacgtgaccccaggttccatcatcgacgatggcgacgaatggggattcgatctctttggcgcgctcgatgatctccgggaatcgcccatatgcggcgccgtaggagtagccagagcgaacgcggagttgagggaaagacattatgcggcctccattgcttgatatgcccgatatacgcccatgcgcttgcaaacttcgtggagcagccgcacgtcgtcgagcgcccggtgtttctgtacatatgggccgcagtagtgctcataaagatgctgcagccgcatgcggtggccgaacaacggcgccgactcttccacagtacagatatcgagcgatgggaaattgacttcgtccaggccgagcttgccgcgagccagatcgcaggtaagcatgaacttatcgaatggaaggttgtgagcaatattcgcgtcggctctggaaaagaagtcgcgaactttctgacgctgatcgaggaaagatgggtgcttgatcagatcttcgttcttcaaccctgtgatcttggtgatgatttcctcgataacgattccaggattgcagatgaactctacttcatccaaaatcttttcaccatcagttatcacgccggcgaattcgatgatcctcggctgcttcctcaaactcaccctctggtggaacgggagtcctgtggtctcagtatcccacacggcgaatatcatgtttgttccctcttatgtcgaaagggccggccgctttcgcgaccggcctgaggagtataccgcgacggctgaagatttacgccttctgtccgtctttcggcgtgatacggccggagcgcatggtggcgtggacaaacgccgaatagttgatcgagtccaaggccgaatcggcatccttgaacccgctattcgccaggcgagtgagtttgcccaccatgtgcatcacgaacagggcgagtcgatggtcatcggcggttttcgccaccaggccgttcgggaagaggatttccatgatctttccgtacatcagatcattgcgaccataggtgctctggcggtcgcggaagacttctgctgcggcgtacagattgttgagaacatcttccgcgaaatcatctggatgggaatcatcttcgcccggccagacggattccatggcgaacggcgcggcgtcttcggtcgggtcttcggactgagccgtttcagcgagcggagacggggctttcgcaaacgcctcgtcgagggtaggggcggagttcggggcggccgggaacgcctcgtcgagggtaggggcggagttcggggcggccgggaacgcctcgtcgagggtaggggcggagttcggggcggccgggaacggctcgtcgagggtaggggcggagttcggggcggccgggaacggctcgcctgccatgtcgttgggcgcgctatcggggtcgctatcggccgcgacggcgaagaacggcgcatcgcaaccttccaggttcaggatgtaggagtcgatccccaggctattgtaggcatcgatgatgtcctggcgatcatcgaacgccgcgacgatcttggtgacgccttcgattttcttcagtatgtcgagcgcgactgcccgcttgaactgaggcgccggctcggtgttaccatacggccgcatgatgagttcatactcgcgatgttcggcgatgccgagttcgcggtggagcttggccctggtctggaaaaagtggttgtcggttcggccggtgacgaagaaaatcatgaggtcggcgtcgatggcattcctgatgcgacctacagcgtgcgggttgagagtgtccttgtcgagacgagaatgatactcgtcccattgccgttccaaggcgaagctcttgcggtggctatcgtcgaatacgcagccgtccaggtcgaagatgatgatgccattctttggtttgcgttccatattcagatttccttactggttgctttctgggtgacggttttatcgatgaacgtcccatcagaagtgaggcggaaaacttcgccattctggatgaaatcgaacgattgcacgttcatcgtgatgcgaatggattcgctgccgttggtcacttcgacttgtgcgatgtcgccaactttctcgacaatgatcttcatgttacatggacttcccattgacggccacagggttggcctcttgtttttccgatccccagaaatcgcggcgcagttcttcctgctcggccgagcgatccatccaggggcgatagaacttgcactggtagataggttccaacggaacatcaatcacaggaatctgacctggctttgtctccagagcggccatgaaccggtcataggatttctgctggatttcctcttcattcatcaccttcgacccatagcgcgggaaggcgcaggagccggtggcgacgcagtgcggctggagcaggctgtcgaacataggatagacttccagaaccagccggcgcatttcgcggaatacttcctgatattcaccctgggtccgaacgcacaggcgaaccttcgccatgtcgctgagagtccgcagattgaacttggccgcgatcttcgtttccatgttggaagggatgatggcacgagcgtcctggagcgacgcgccggcctccagaagcttctggtagctggtttgcgcgtcggcaatggcgtcatgccacagacggttcagctcttcgcggacatggtaggtcgggtcaggctcgccatttaccgtagccggttcgtcgaattcccagcggaaggcttccggctgaacgacggcgctgatttccagagcgcgactggtttcctgctggtaagccccggtacgggtccgaacgagttgatgggtgaagttcttgctgacaccctcgatctggaaaatgaagtccacgaactcgaacggcgagcggatggtgtccagcatgtacttccagtggtcaagcttttcggcctcggtcatggtcgccgggtcttggccgcgcatgcgagtggatttcgtccccaggagaagttcccaggcgttctgggtgtaactgatcagagaaattttcatcagaaatcttccggaattggcgtgaagtggaattttttggttagagccagggccaggccttgggcttgctctttacgaaggccatactgccctatctcttccttgagcagttcgcaggcctccagacgcgactcatactcttcagcctcctgaacggatgagaaaacggttccatcagaggttctgtacacaagttcaatcgacatgatgacctcagtagcagcggatgatttcggcgcggatatctcgacggtcgaggtagtgctcacgaatcttatcgcgggcgcgctcggcctcttctcgactgccgaacgacaggttgaacgaagtgaaaggcttatcgtccaggcgcccatcgccaatcaggtacaggatgcctaccagcacgaaagacggcgctgtctgtcgcgtttgcggcgggtcgatttgcatttcgaggaaagacatgggaacctcttcaggatgatctggtgcgtacattaatagcgctcctgctgagcagctacggtttccggctcatagatgagcatgtcaacgatttccgggcactggcctttcacccagtcgatggccgcgaccagtgtggtggaagcggagaaagagaaagtgcggtaagactcatggatgtacggcgaccccatcgaatcgcgctcggtcgtgcgagaaatgactgctttgatattaacgatccggcccatcttcggcctccactttagcgattatatctgacaggctcagcttctcgccattcaggaaataactggcgcgaaacttcctgtcaccctctggcccgacgatccgggccgttatggtgagactcccgccgccaagggcatcggtgtccctgaagaaagccagcagcgcccgcttgagcgctgcctcgcgaggatcgacggccattaacctaccacgttccagccgtgctgagcgcaccaaaccgcaccggcccctgcaggaaggctattcagaaggaacacaggagtcaggcgaccgtcctcggtcatatgtatgaagtagcgggcgccttcaccgagccattcggccttggcgatagcgcgttcgagattggccttggtggcgtaggttttggtgtggttcttgtcggtggagaaggttacttcgcgggccatttgtcgattccttttggttgaagggtttcgcgtttcgatgagggaatattacgcccacctgatccagaagtaaagcacttttgtaaattacttcacgaacatctgcttggccttctgataagacgaagaagtcatcaggcgctcgatgacgtccatgtccgaaaccagatcatccagaaggacattgcgccaggtagcgaaccggccgagcgagaagatgccagcctcatgggtgagattccagatcatggattcgcgctcgtcgcggccgagaggaacgattttgcctttggtctggatggtcggctcgccgtcctcgattagctgtttccttctgatcccgaaggccgcgcagacttcatccaggtcccatgccggattccattcgatggtttcgatctcaccatcagcattctccaaaacgccattcgcgacggattccacgatcagagtatcgccggtgatggacgcgcgaaatgtcccgaagtcgggactggggaaataaacggtctggaagacgtcacaagggatggaaagcttgtatcgactcacgatgatggatgtgcctttaccgaatgacgggtcgatacccaggtccatccccgccgcagccaggttggcgcggaacggcgcggtgcttatgacattcacatggtcatcttgccggcgaaggtactggaagaaagaggcgtcgaaaggacgactccaagtgatgcggttcgccagcttggcgacaagctgctcatagaagtcggccggtgcgatccaacgcttttcagtcgccagattccagatggaccggtccgacaggccgcccgttactttcctggagtacatgttgcagtggtcgatgcgcggctgggaaatgaattcgccgtcgatgtagatagctttgtgtacagtgacttcgcggaacgggataccggtgagttggccaattactggcgagcggaatcgcaagagtgcgttgtgacgctccttgttctccggcgtcgccgcgtcgatgatttgggcttgagggaaacgatgcgcggcgatcaggccggcgagtccagcacctacgatgatgactttctgatcaggaatcatgatgtgttccttctgagtgtacaaaacttgagaggataaaaaagggacccattttcatgagtcccttgaagagctagacgattcagtctcagaagagcggcggcttactcttcttcaccatcggaaccgtcggcgccctgatcttcaccgtcgtgctcctggccttcatcaccggccttctcgtcatcgccctggccagcttcgtcttccttcgaagcgatggcaaccagatcgacccagcccatgacttccagcttgctcagatagctgcgaaccgaggctccatacagcaggtgtgccactttctcgccaaaagcttcgatttctaccggctcaccgacggcgcagttctcgttgatgtaggcaaacaccttgccgcgaatcgaaatggcctgcggggtgccatggccgtcgccggtcgggatgaagtgggtggcgcgagggcgacgcgagccgttggacttcagttcttcacgacgggcttcggccttcgcgcggcgctcttcctgctcttccttgcggcgctgcttctcggcttcgcgctctgccttcttctgctcggccaggcgcttgcgctcttcttcgcgtgcggctttctgggcttcctgcgcggccttcttctcttcggccttcttggcgcgctcggcttccttctcggccttcttctgctcgcgctcggcttccttcgccttcgccttctcggcctgctcagcttccttcgccttggccttttcagcgcgctcggcttccttggcggcggccttttccttcgccttctcggcgcgctcggcttctttcttctcgcgctcggctttgcgcttctcttcgcgctcggctttcttctgctcggcttccttggccttggcttcggccttctcggcgcgctcgcgctctttacgttggcgctcagcggccttctcggccttgcgcagggcagcggcttgttccttggtcagctcttcgccttgggtctgttcgttctggtccatgttcttactccgggaatgtttgaaaggatggcttattggcctgtgagaggattatctctaaactaattgaagaagggaatacctttcgcctgaacttctctaaatatttttctttcgggaaagtccagactccagggaacttatttatgttagcgaagtttttaactcttacgcaaaaacaacaagtattcgattgcgcgagttatcccagtatacatcaactgactataagggatggacggcaagttttcttctaacatggcaacccgtttccattctgaaccctgcgacttgtggaacgtcatcgcccagccgaagtcgaatccgccaatagccttctgcgcctccagccgcacgtcttcctcgaccgaaaagctcagagggttgaacttcacccatcgttcatagttcgtgccgataatgcgaactttggcgaacaacatttcatcaggctcgtcgtcatcttcttgcccttcaggaactggcttgaagtccagcagaatggcttgttcgccgttcatgattccatattcgtgctggttcccagtgcacaccagcttctcaccgattcctggctgcacgcctttgtagccgaggattcggcgagcgcgtgcgttcaagcgacggcgagtattgttgtaagcgcaaagaatcacaccatcgttgtccaggaacgtccgcatttcatcatccgacatatcgaagccggcccggaccactatgtcatcatactcgcggcagggcaggcgctttccctggcggacgaacatcgacgcccgaacgatattgccggcgttgcgctcgatttcggtcatgatggtatcacaactgttctcgtggaagatctggacgccgcgcacaggaggcacctggccaaagtcgccgatttccaggaccggaattcggtgcgacaggaggcgctcttcatcccactcgccgatcatggacgactcgtcgagcacgaccaacttcggcttctcgtcgagcgagtctttgttggcaaacatgatttcgccgtcttcatcttcgccaatcggccgatagatgaagctgtggagggtccgggcattggtgcagcccttctcgcgaagccgcgctgctgctttcccggttggcgcgacgaagactgtccagtccatcgagcagcaaagttcggcgattatcttcgcgatggaagtcttaccagttccggcgaaaccagcgagtcgatagacctggcggcggtgcgctcgatcacaccaaccgcgataccagtccacaacggaattgatcgcgtcgatctgctgactgtttggtcgaaagccgaatcgctcttcgatctgatcgacggtgaagttagatgctgacatatttgcgttctccaacgctaggtttaattgaatcgaggctcagtttaagcacgccgtccacagaccagccagtatcacgacgatacttgcggccttgcgggtcgacatagaagttcttcgtgcgccgcagcagaacataatgccaagcagctccaagcgcgtggacccttcctttatacgggaaagccttcgcctgctctgcggcctctttggccccagggagccagcggacggtagaaaggaccaggaccgcacccttaatagcctgggaagcggcgcggccgtcctgtgggctatagcgatgtctatcgaagtctacccagtggtggttgccgcgccggagcttgaccgttcgggatcgcccctcgaacaccacagtgccttcgtgagttaaaatatgttccgccatcgaatgttcctttataacgtacagttatgctttacctctgcgcaggaagagtatactatcagctgactcgccaaagcgagcgaatttaatccaactttacttcggcaggaaagtggccgatactagagccgccgcctgtactgccctccaaaacagaggatacattaaatgcaagaatgcaagatttcccgcgaccaactcccggtcggtaatccgaatcccaatgtcgacaagacccgcgacccgaaccttaagcccggtttcctgcgtcgcagccgcgagctggacccggcgctggccgttcgcatccgtcgcgagctgatccacgccgaagcatccgacttggccaaggccggatgggtcaattcacagtccagcctttatggatcgaaagccttcccgcgccattccgtcgttcgcgtgaccggagttccggaagatggagctttcatcggcatgctgatcggcttcatcgagcatcgcgagcatggcgaatgggcggtcatggaagccggaacgaaagaaggcggcgccgtcattattccagtcgatcacatcatgcgagcgtcattcgccgaagccgaagagttcgccgaaaagtgggagcggaacttggggtggcgtctcctgcgccaactccgcgagtgcggcgccctggccgggactgaagacgagttcctgcggcggatcatcaatcgatacgttcgtgatcgcacgatcctcgatcaccacaaagtcggcgcggacaaaacctatactgatgcagtactcaaaagcatcggcgaaacatggccgaagattccttcggggaaattcgtcggacaccgagtcgcgcagctcctgatcggccacaagctaggtcgagcggggaccatcctgaatgacctggtggacttcctggagaagttcgcggccgggcgcgataaaattctcaacatcgccatctgtaattgaggtgaatgaaatggttgacttggaaaagctgagtccaaagctgagtcctcggcagcatgccgttctactggagatgtacaggcatcctgagcatccagttcacagatcgccaacgaatttaactcttaaggctttgagacgaagggggcttgtcgagctatcctggaaggattccgtggctggatatatgttcggtcgccaaccttgctggaaaataactgatgccggcataaggcgaatcctgggagtgctgggggaataatatggaaaaagaacaaagcgaagatcgcccaagcatccctgagtttgagaagaccgacgccaacaaactctatgatgctctggagacgatttcgctgctggagaagaagttggacgaatccgaaaagcgcgggagcgagctggccgcgagctattgtgacggcgtagtcggcgatgaatacggccatccttattgtcgttataaagtggaacgcgacgccgccttggccgaagtagagcgcctgcgagaatcaaaaggcgatccctctggcagcttcgacaggtgtatgaagatgatgtacgagcgcgacgagaatgcaaaacgactcgacgccgccttggccagggtcgcggagctggaagggaagttgacggactgggtgcacgaagggttccggctcaacgaggcgctagcggtcgccaaggctcaacccagcgtgccggaaatatctggcatcggtcgcgatgccgaacatcccagagctgtagtgctgtatctgcgtaacgaacccagcgatgaagatatgcgagcaattcagaactttttgcgcgccatggccgcccccgctcagcacagcgtgccgaaagcatggctcgacgttcaggcagagcgccgccggcaggtcgaggcccaggcgctaaggcaggaagtcgcagcactgcgcgcaagggcggatgttgtgccggaggtgttcgggcttgagcggtaccgcgtagaaaaaactgggaagggtttctggccatactgcgtgcgtgcgggggatggaacgcgtgaactgttcgtcggccacttgaagcagtgtcagcgggtagcgaccgaattggctacggcgtttgaagatgggaagtttatcgccgcgcccggcagctcggctcagcacagcgtgccggaggggtggaagctcgtaccgatggacccgacatcgcagatgacctatgtcggtcagtccctgcgttatgacgcggtaaacagcatcggcgagatttaccggcaaatgctcgccgtagctccctcacccatcgatccggccgcgcatcctcagccgtgccagcaaccacaggcccatcctgcccgctgcgggtgcgagcggtaagtgccaagtaaggaattcatgtaatggaacagaagaaaccttcaccagtagatggagtcatcatgaccagcctcgacgttctccggaaagcacagcccgaagcccaggacgagtatgccgtgtccatgttcgcaacggcgatccgccagaaaatgcagcgctcccgcgataaaggccgaggcggctggatcgactgcgacgaagatattctgatcaacggattcgccgaacatgcgctgaagggaaatgagaacaacctcttggacctggcgacattcctgatgttcatgtgggtgcgcggcatcgacgatgcgaagattcccccggcgctcgaaaaggcgcggcagcacaagatcatggaagcatggagtcgggtccacgaagatggactaaactccgccagaaaggcgagtgctgcgcgacagttcgtggaagtgcctcgacgcaaggggcgcccggagcgacttgcatgaagcctcacgaaataagactggcacaggccgaagagttcctgcgcgaactcggccgagggattccggacgacgaacgggtaatggtcggctacgctgaagaggccacagtccaaaccgacgagaacggccgcaagctcaacgccggctggtggcctgtgccctggaaggaagggaaatacataaactcccgatccaatgcctacgcttgcatctcgtcatccatcaagacgcccaacccgaagaccggccagatgcgatactggcgcggcgaagcctctttcggccacggcctggcgttgatggtcgatgacatcggctcaggcaaagggtccaagggcgacttcgaccgcgacgagttccgcgagcgactagagccgaccgcgattgtagagacttcgccgaacaactaccagttctggtatttcttcaaagagccgatgtcccacatgctccagttcaaggcgctgctctattcgttcgtggaccaggtgctaaagaaaggcggcgacaacaccgtcaaggacgtcagccgttacggccggatgccattcggcttcaacaacaagcgcgggaaagacggcaagttcaaatatgccgacgaaaacggcaaacctgaactcgtgcgcctgtacagcgccgactattccaagcgctactcgccagaggaaatcgcgcaggccttcggcgtccgcatcattatgccacagatgaagaaggtggagataaaccgcgacgattgggtgtatgaccaagtatggctgaagtatgccgagcacatctgcacgaaatacaagatgggagaagcggcaggcggccaggtccagcagaatatgtccggcaaataccgcatccgctgtccctggggcgacgagcacaccaacggcgatcctttcggcgcatactttcgcggaccgatacctggcgccgagcacgaatatgtgttcggatgcgggcacgatacttgccgcaaagagcatcgacggacatgggcggccttcaccgatgaagtcgtcctgccctatatcgtagaacaattggaacgcattaaccgccgtcacatcggcgaggagtagtaactatgcaaaacgatcctggaatcctgattaccgccatcggcttgctgttcctcggccttatcatcttcttcgaaggcctaaagggatggaaaatacaagtcgcaaacttcctcgcgtcgcttctgtgcttcttcttcggcctttctgctttgacgttctggttcgtcgttgcgtttgacgtattttaatcgacgaacggtacagaaattttcggatggggacggaacttattagctatgccggtttaggtaggagataatagccgtccctttcgcctcaatgtgtagaggcaatgttgaatccgatcatgtaaagcagaaggcggcaaacctaacatgattatcgacgaagataatatttttgatgatgacgaatcagggtccagtgagtttgatctcacgcagatagaagatgctggaatggaccctttgatgaccgccgcgagcaaggcggccgatgatgcgattgcgaggaacgaaacgcatcgcgcgcaaaaggcggcaagatacgccgaggcgtatgcggaaccagatttgagaaaacgagcgcggttgttgatgctcgaccaggcctttgatcttccggtcagccggctggtgaaaggaccgttcgatgactttatcaccaagtacagctcgacttcagacagcaactacctcgcggtctatgatacgttgttctgtaagggcgacggaaccgtcccacacccgcacttcgacgagtttcgcggccggctggtggaccatcgcggcgtggcgttcaacaacaagaccctcgatccgattgacctgatgggcgccctcgcggctgcggccttggacgatccctcgattaagaagacgattgagacttgctgcgtgtgggcgcgtcgatatcgccgcaactctttgatcgaaacgtttgagaagaagataccggagtgggatggtgaagagcggatcgacacgctgctgatcgacttgttcaaaccgttcgacaccgagcttaaccggatggtgagtaagtatttctggctgagcttgtactgccgcatcaactaccctggaatctcagcgccgatttcgctggcgttgattggtgggcaggatgctgggaagacttacttttcaatcttgatctgtaaagagttgtcgagcgaccgaaagttatcgccggtccagcttgacctgagccgtcatgaccagacgccatttttgcgcaatatcactggcaactcggtgatcgcgaacgtcggcgaaatgtccggcttcaaaaagggcgacatggaacgcattaaagagttcctggtgcgatccgatgatactttcgatcagaagtttgaaccaggcgaaactatcagtcgacaatggatcaccatcatggacggcaacggctatgatggtcttcaacgggatgagtcaggaaaccgtcgattttatccaatgttcgtggcgcaacttcccgacgaggatggcaagccgaattgggttaaaccgggcgatggaaatgaaactttccgcgttgacttcaccgacttcggccgcaaattctggcaagccatggctgagtgccgcgcctggattaaggcgaatggcgtggagggatatctcagtctagttcgggcgaccaacaacgaagtccagaaattctctatttcggaaatggagaatgcgcgtggcgtggttcgtgatgacacgattgatatgtatctgatcaacgtgctgatcagttgcgagttcgaagagatcaagcctggcaggaattcaaagaatcctggatggagagtcaacaccatcgaaatcctgaaatggttcgatattctcgccaggaagaagccgatttctcgccacttaactccgcacctgaaggcgctaggatttgttccgaataagaatggcttgaatggctggtgcctgcccgtagataaggttgcgcctggatggaccagagatatgcacacgacgttgccgccgttcaatgatgtgcttgtatacttgctgaggaaggttgattctgaggtgactgatgaagaggcaatgattcaaatccgcaaagttaaggccgagcgcgcaaggatattgggtgaggatttctgatgtagtgatggagtatacttggactaggccgccttcgggcggtcttttctttggtgcggagtacattcgatttcggttgtggccgagtgagattcggaagctatctggtaattagggtttggtggcgatggcgcgttgtggaaagttcgtgaacgttggatcaaggattttgtgcggtgattggatgaattgtggaaaatcgacgattctgactggatttttggggtcggccgcgccggtcttactggtaattaccgaaaccgggaatttgggtcgagccttagtgccgcgtgggcttgaagcgcttattcggatacttcccggtttcggatgcagccgcaaaagtatactacagcgaaaatcgattgcacaatcctaatagaaaaaatctatcacggacgttacctatctttaaaattaataaaattaatagtaatttggtaatttggtatactttagcatttgaaagccttgcggcactaagcctgtacacttcccgtcaagtttccgattccgctcaactcgcggcagggtcgccggaaacttccggacttccaatccatgggtcgcggcaacaccacggcggactaagcggcaagtgccaaaactcgacgaacggaaccggaaatttgggagcgcgacagaatcgctcagctggacatatttctaacattcgatttaacactcaatccaaaccctcaccgccatcctcacccaccaaccgccgactcgatcctcacccaccagcagaccgcccatataacatcctataacaccacctaacactcattcatcatcaaacccacccagacctacagcccacccacaagcagcccatagacgcgatctctggccccatagtacaatcgcgccatactcagtgtcgcgacagagcaccaggccccatccaccaaccgagccaccgcgacgactccagaatcgaactcagggacgcagcaccaaatgaccaaattctacagccccgacgatctagtcacgccacaggaattcgcagacccgcatttcgcggcgatcaaccaaaagcgattcgacctgtacatcgacctgcgcgtccaaggttacagctcctggcgggtcttccgggccatctggggcgaggagcatatggacggtcccgcgcaggcccgcatcttcgcgatggagtccaacccgtactatcgcaagcagttcaaggccaagttgaacgcgaccaaaacgtccgatttgtggaatccaaagacggcgctccacgaactcctccaaatggttcgtgaccccaccgtcaaggactccagccgtctgtcggccatcaaggaattgaacgttttggctgaaatcacgttcgtggacgagtcgggcaagaccaggatcggtcgcggcctggccgacttctacgcatcagaagccgaggctcagaccgccaccgtcgctgctgcggccgaagccaatagctatgtgccggaaggcgaagagggagatttcccgtctccgacgccggaaccgaccgaggaagaccgcgccaaccccatttagacataaaataacatcgttctaggcccgaatcggaccgaactaaggcgacggtagcgggaagggacgaaaaacgattctagggcggttctaggaagtcgaccaataacgatcagaagcgacaaagccccggactctagttcagaatccggggctttcttttgggtttcttattctccagcttcgatgatttcgaagttgtatttgacgccttcgtgctcgaaagtcaatttgccggacgctttcagctgcatgcggaatcggatgcacttagaggaaggcaaaccgaactcgatgaaggctgcgttgcaggatttgaactcgccgcgcttgcctttcacggtgaccgccacgccatgacgctcggtgcgcttgcgggcgacttccgggtctttccaggagttggcgatggctgctgacaggtctttggtctctttggttttctccggcgcgttcttcgcctcttcgcgcattttccggatttcttccagcgcttcctcttcggtgatttcttcttccggcttcagattctcttcggccttctcttctgccttcttcttggaagtgcgggttttgtaaaccttggccggggcttcctcttcctggaaggcctcttcctcggccggcagagcgttcaggatggcgaggcagcgacgctcagcggtcttgcggtcggagaagcgctttacagtcgcatcggcgttgtgagcgttgtagaaggcgaccagttctttcatttctgcgttctggatgtcgccgaaggttttgatggagttggtcattttgcgatcctctgttttggaagatttcgtttgggcttcagtttgtcgccccgttgaaagagattatgcctaggtcgatgctgcgtgtctacatctatttcatcagattgatcacaaagccgacgaacggttgtctgatgtgaaaacaccgcagagcaggctgcggtgtttgttggcgttggggtgatgtcagaaagtcgggactgtgataggctcgatgggcggatcgccgggcctgtcgttgtccgatgcgggcgccgggctggaagggatcgcacccgaccgaagcgccagcgattccgactgcctgcttacctgcggagctggaggcgcttttggcgcatgaggcgcgggcggaaccggcaggcctggaggagccatcggcgccctgggcggctccggaagatcgggcagatcaggaagactcggcgctatgccgccaaaggaccgctgcgaccgctgcgacggattgtcgccgaacatttcggcggatcggttgtccttgatgacttgacctatggcagtcttgtcgccacccggttctgctggatcgaagcccgtgaatggagtggtaacgcagcgcatgttcggatgggtcggcagattgttcaggacgatggagtccgcccagacatacgggtttttgtggttgccgggtccgtggctgatgatctcggcaggaatatggccgttcatggtgagccattccgccatcccttgccgagtcagcgggcttaccacgatctgaccagtggactctttggcgatggcgaacagatcaccgaattcgaatccgatgattgtgtagttggacctggactcgccgacgaaagccagagtttcgatgttgtggtggatatcttggtcttcccagatgtacagcatggttcgctcctcaataaggttgcttttggtgttcgaccagagacataccggccggaactttgaagcggacgtattcgatcatcatcgccgttcgacgccgattcgtgcccgactcgtcattgacgaatagttcgcactggtgcggaatgactcgcgtcaccaggcactcacctttcgagccgtagaacttgctgtaggctgcgacgcctcgcgtcatgttcagacggatcgtttcgcagagtcgctgcgcggccgacgcgctggacagatcggtcggactgaccgtcacccagtaatggccactttgttctttatcggacataagctgccctccaatgagaaagcctctgccgagtcgcagaggctggttgttgttagtcgcgcttcaacagaacgactttgtcatatgcgcgatatttaccgcgccagtcttcccagtagtcgccggccgggcaggtaagctccagggtgatttcgtcgcgccagcattcgacagaaaggacaattgccttgttcctggctgcggaatccgccctgagcttaatcagaatttcgtcgccagttttcaactcatcaactctcacaactttggccatgacacactcctgtttgaagaggcgcggccaggacgatcccagccgcgccgatggattaacgtttgtgaaggatggacactgcgtccacgtcgaggatgctgatggtacggcgacggcgcggattgctgcgttcatggatgcgaatcaggttcgcaactggagcttcgtccaccacccatacgtcttccggtttctgcgtccggagcaggaccgtcacttcagtattctgggcgaggccgttgcagatgaaagtgaacttggacgagggagttctgtacatttcgagattcctttttggacttctggttcggcttctcagccggtgaagagattatgccctgattctcaccgccgagtaaagcatttgtgtaccaattctcccgtcaggtggaaccaaagtgcggtatcgcttatggctacgctaccgcgccatggcccttcttgctcgcacactgcgaaccacaggctgatttccatccttgccaggactcggccgaaagattcgaacctgcgccgactggacaggatgtcgacattcactcgtcgattgacctcataccggcgaccgttgatgacgaagaccagccgcagggtttgtccgtccagacactcccagtatttggtttcataccgaagccagtagcgcttgccagccgggcctaccatggtcatttaatcgatgctcctggccgcgccacgcggtccggtcggcgggacgggatcgaaccgacccaggatgtagtcgggccggcgcgcttcctgcggacaaacggcgagaaggcgccatccagcgtccagggcagactggagttcgtccgtgcagcagtcttccttgagcagcagacggttgacgttctggagattcggaccaggtatggccgatcctgtgagtgagttccaaccttcgacgccgtgcaccatctgcggttggttgatgtagccttcggacctgccagccaaccggcttgcggccagctccaggcgctcaagcatgggtcgcagagcagcttccgggtcaatgtcgtcccagagaaggaccaggctgatgatggtatacggatagtccttgtccagatcccaggctgaagcggtcagacggcccaggccgatttcattacacatcacgggaacgtcgttgctccaggtggacggctcccagttccgctcaccaggattcccgattgttacgccttccaggttccccaggagaacgtggagcttgctgacatattccgcctccaaggctttccgctcttcgtcggtctggttgtggcgatagaaggatggagggctgactttggcatggtagagtttcataactgttcctcggttttggaagatttgaaagttagagaatggtgtcgcagtatttctcgaaaggactctggcgcttcttctcgcagatcgcgcaggtgatttccaggtcgggtagctcgctgtaagtcttgccgagatacagccagcgcttgcacagactgcggccgtccgacgtgaagaagtggactttgcgagcattgccgggttgcgcccagccgcttggtgccggcttcctgctcataccatcaccacgtcaatttcgtcggcgaagaagttaaagccaactccatctgcgtagccagtgtaacgcagacgaatcgtcccatcaatgtgggcttcctcgacgccgatgacttccagggtggtatcgttgcagtacagcttgacgaacatcttgatgccggagccaatcgccgcgaaggcgatctgcttgtacaggtcttgcttgatcatgctttacgccggagccaatcgccgcgaaggcgatctgcttgtacaggtcttgcttgatcatgctttacgctcctgtttgcggatgtattctgccctgacttcggcttcgaacttcgcccagagcgcgttgtctgctggaccccagggaccggtctgagttccgtccaccggttcgaacttgccaccggcgcggcgatatttggacagagttttcaggctgatgatcttctcatcttgggaatcgaattggacgatcatttgacgtacttcccgaagtagcaggtgtggaggatttccagacccttggagatagccttcagcttgatgccgaaattcttgatcgcccagtccagatcgtggtgatagaactcgatgatgttgacgatttgaccggcgctgtagtggatgacgcgaaccttgccgttccagcggaagtcttcgcggctatttacggcctcgactgcgatggtgtcgtttctgccgatgttccatttggagctagtcatgtcgcaatcctctttttggagtgtttcgcgtttcgatgaggtaactatacctcagtcacctcatcgagtaaagcacttttgaacatattatctgaaatttctgtgagacggatccatcggcggattcagtcagtggaaccgagactccatccgttgcgggcgaaggccgagcgaccagacagcttgcggcactggatggagctgccatcgtcgaaggtgtaagatacggcccagtccaggcgctcgcgacgtactgacgccgcagcgatatcttccagacgggctttgagaagctgttctgctttggtcatttcgagttcctctttggggcgcttcgtgtttcgatgagatgactataactcagtcacctcatcgagtaaagcgattctgaggaattatctgaagtttctggaggccagaaattgccgccagagccagtcaacgtgatcgttgaggtagcgctcgccatcggacgacagagccaggcatccatcctttatgccgagcttggagctggaaatccattcgaactcgaactggagcgttcctgggcgagggatatgggacaggctgtacttttgcacggtcaggaatcctctaaaggtttggagttcgcgatggacgcgactttctgcatgccgatgcgatagaattcggcctcttccctggccttggccagctgctccctggcttcgcacgccagcttgtgctggttattggcattctggatgcttccgtccagactcctgtccaactcttcccgaagagccttctgcgacgctagctcggcctccaaatcctggattctgagttgaagctggcggttctgctcggcgaccttgtcttcgcgggctacgaagttctgcaggcggtcgacaagacgagtattttcgcgcaccagctgctgtttggcgactttggtccttcgcagttctgctcgcaatgcggacaactccagcgcatgcagatcggcgtccgattcttgcgactctgcggcctgcttattgcgcagatagtattgcccagccgcgaaggcgagcagtgctcggtctgtatccttaactgtcttggccatgaagtgggctcgatacagaggcgcgaacttgcaggcgtctgggtcccaggccagattatcggccacaggccagaatgcgcgaaagcttttcgcatcgacatgcgccttgaccgtctgcgatgcgcccgactcttcgcagatgatttccagagggacataaatggcgttcttgatgcttcggaaagaaatggtggacataacacaatcctcataagaagtcgcggccgggaccatcctggccgcgcatcgtaatcactcttcgccttcgtccgcgctcagccactcttcgaaggcgaaattcaccttcgactcgacccaatcctgcagctcatcggcgaactcgtcactgtcgatgtccatggtgattcccataacttccatgttccatagcgcggcattcagttcgaactgtaccatctgctcgccatcgacttccagcaggatgcggtctgcgacttcatagtcgtctacatcgaacagatggccgcccgccaggaggtgctgtacgaaagcttcatcgaggttggtgacttcgatctggacttgtttggtcatttctgcgatcctctgttttggagttttggagcccggttcgccgggcgcgggtcggttaggcgccagtagtgatggccaggcaaacacgcttgtattcagcgctgtttttgcggacctcgacctgcaccggcatggtgaagctgtggcgaatttccaggcggtaaagtttggagtttatgccggaaaagctgccgtacatgtactgcttgccgttcacggtgtggatcatcgttttaccctccagggctgtcagcccggcaaaccgggcgggtgattccgttacagcaggccggctttgcgctcagccttgatggtgtacacggcttcgtcaaccagccactcttcagcttccaggtatgctttggcgacttcttcagtgaccacggccaatttagcgacgctcaggattttggcttgcttagtcatgttcggcttccttttgtttgaaggtttcgcgtttcgatgaggagattatgccgatagtcagaatggaagtaaagtgtctgagtgagaaaattctgcacaccgacgaacggttgtgctcgaccgtctgctgcggtgtcgatatactcggcctattgcgaacaatggactgattaa

SEQ ID NO: 11 - DNA, 66265 bp, Pbunavirus EPa12
  source 1..66265: mol_type = genomic DNA; note = EPa12
atgttcaagctcaatcctgcactgcgagcagtctggcgaactcgcgcccgttacaaagtcatctatggcggccgggcgtcttcgaagtcgcacgacgctggcggtatagccgttttcctcgcggccaactacaagctcaaattcctctgtgctcgccagttccagaaccgcatcagcgaatctgtctacacattgatcaaagacaagatcgaaaactcagagtataatggcgaattcatcttcaccaagaactccatcaagcacaagattaccggctcagagttcctgttttatgggatcgcccgtaacctgtcggaaatcaagtccaccgaaggcatcgacattctctggcttgaggaagctcactacctgacacaggagcaatgggaagttatcgagccgaccatccggaaagagaactctgaaatctggatcatcttcaacccgaacgaagtcaccgatttcgtatatcagaacttcgtggtaaagcccccgaaagactcctgcatcaagatgatcaactggaacgaaaatccgttcctaagcgagacgatgctcaaagtcattcgcgaagcctatgagcgcgaccgggagcaggccgagcacatttatggcgggattccgaagactggaggcgacaaatccgtcatcaacctcaagttcatccttgcggccatcgacgcccacaagaaactcggctgggagccggccggatcgaagcgcatcggcttcgacgttgcggacgacggcgaggatgcgaacgccactacgcttatgcacggcaacgtcatcatggaagtggacgaatgggacggcctggaggatgaactgctcaagtcgtccagtcgcgtttacaacctggcgaagatgaaaggcgcatcggtcacttatgactccatcggcgtcggcgctcatgtcggttcgaagttcgccgagttgaacgatgccagcccagacttcaaactgatctatgacccattcaacgcgggcggcgctgtcgataagcctgatgacgtctacatgaagctgccgcacacgattatcaagaacaaagaccacttcagcaacatcaaggcgcagaagtgggaagaagtcgcgacccgattccgtaagacttatgaagcggttgagcatggaaaggtttatccattcgacgaattgatatcgatcaactctgaaacgattcacccggacaagctgaatcaactatgtatcgaactttcgtcgccgcgcaaagacctggacatgaacggccggttcaaagtcgagtccaagaaggatatgcgcgagaaacgcaagatcaagtcgccgaacatcgctgactcggtgattatgtcggccattctgccgatccggaagcccaaaggcttcttcgatttctaaacacagaaaagcccggatcgctccgggcttcgggtcttactcggtatggttcctggcgctgagtgtcgatgcaacggcctcgccgactcccagggcttcctggccggccgcgagcgcttcggcttccgactcgacgatgaagtcatcaccttggccgtcgccgggcggaacctcgaccagcacggcttcgtcgccctcgaaacgcagatcataggtcttttcgacggacagaccgtaacgggcgttgagcgcatcccagagctgagcttcatagttgcgcaggtcttgcagagatttctggtggctgagcatcgccatatcgacggcccgttgcagggtttcgtccaggacgttgaatcgcatgcgaagagaacgaatccgctcgaccacttccgcatccaccacatgtctttcgatcatcacttttcacctttgctgaatgttacgttgtagccgttgtcggccagataggtcagggcgccttcgaaggaagttccgacaaggtgcttgagctgcattttgcgttgcgcggcgatccagaatgccgttccggagaactctgcgcggccttccgacaaaacctttccatcaggcccggcgatccgtacatggacggaagatagcttcagtgccatcagtggaccgtccctgtgaaggcgcgcgccgccgcgcattgatcgcaagggcactccctctggatgcgcgccagatcgtttgcatccagggcgtagagttttccatctacggtatcgtgagccattgcgatgtccggatattcgttttcgtccaggccggatgccgcgcggatgttgttccagatgccggcatgttccgcgcgatggcgcgcggtcaactcatcttgctctttgttcgccctttctacgaatttctccaggacttcggtgaatttctcatcgatgactcgtgcagacttggcggagctgaggcgaatcgggtctttcttcatggtgattctcttttggctggtggttgttcgttgctcaggcctattcacagcctgggcagcatgatgaatatgaacacaaaggctgcaaacgccaatagcgttccggtaagcattttggactgactctgcatctcagcgtactgctcagtggacattccgtgctgcgccgcctcggccgcgaagcgggctttcgcctcgataacttccgggcgcagcgacaggacatattctaaggcctcttcccgcgctttttcggcctcgaccgacctagggtcgcgggccgagacttcgctgtgccctggcctcgcgggatgggcctgcagcgatggcggaagttcggcggccacgactccatagtcggcgcaggcccaagctatcccgatgaggatcgcgaggatggattgaacgattcgcagcatcactttgtcgctaggaaagctcatgatcaatcctccaccgaccgaacgatttccatgttgcgcccggcattggttccggcagtgtaggcgcgccgaccgtcgctgtcgtccaggcgcatgagcttagtaacattggacttcttgtagccaggatcgccgaaatgttcgtgaaccgcagcttccttcaccaccaccagagacgttccggcagaagataccagctccatacgcttcctggtgatggattggaggcgatagctgatttcctgggtcgcggcgagcttgaattgcgcggcaaccttgacgttgaaccgttcgaatccttgagctttctgatactcccggcacagacgatcaacggcctcgaccagggaattgaacatgttcaccgccagctccacgtccgacttgtagcctttaaagcgaacggcatggccccagcgtttggtggtgctgccgtcgcgggcgctcctggacgccttggccgatgctcggtgattgttgacgccaccggcgaaatccatgatgcagtcgttgtacgtcgcaacggccaccgagaagaatttcatccaattcgggattgcggaatagtaacgagtagcgatttgctcgtcgaactcttcgcgaatctcgccggccgcttcgaagtcgtgaagatcatatttgtccttcagcttcttcacgcgctcggcagcgatggccgcttcgtgcggactggaagagtcggccgccatggcggtcagcttgcggatgcggtctttcgctttctcgatggcttccggggtgaattcgttctggtcggtcatgttacgttccttttgtctgaagggtttcgctttcgatggagctattctgccttcatccagaatggaagtaaagcattttcttccattatttcggaagagcctggaaataattccaagcccagtcgcctgcggccaggacgaagatgatgaccgcgaagaacgcgattgcagcgaccagttgcgcgcccggcttcagcttgggatggctgagcttgggctctacgggaacgcccggagtgctggcgctggaaccggcgtctcctgggccgtagccgattccacgttcacgcgcctggagcgacaccagggatttcagatactcggtctgcttttgcgactcttcgtagatgccggcgacggcgaaccagagcgcgaacactacggccgtgcatatgacccaggcgccggtcagcaggagggccagcggaccgatgaggaagacggaagcggccaggacgatggcgccgccccagatgatgaagccggccagaccattggtgatgtcgatacagaactttttcatttttcagattccttcggttacgggatggaggggatttggaactctgcgccgccgagaacatcaatgacgacttcccagagcgtcggaacagaccactggtaacggtcgaagtcggtttcaggatcgacgcccagcgtcacataggaagtggcaggccatttatgaacactgcctttccgcatgagagtcgccacgcggccgtcaccgagcggattcgtcctgtgcggaacgtacgcagacatcgaatattgctgcccggcgtcgacaacaaatctttgcctctggcgcagacatacagagcccacaggattccagccgcgaccgccgcaagcctggcgagccgaagaatgctcataaccttcgtgagtcatttcgccgaggcaagccgagcgatcctcgtaatagttgatgttctccatcgatccaaccagcaccagagactcgaaatcgaatcgatgatcgtggatggccgagtgattgaagcaaagccgacgcggcagctccgggtgccaaacatggaggcgaccggccggaagttggacctgaatgaaccccaggccgtgcagagtgatcttgtccttcatcgggtcatggacggtgctcatggataatcctcagtagcagaaatgtattgtgagagttacgattgacaagccggtcgcccatagaagggcgaaccaggccatggctttgacggtcgtgtagatcatccgaagaattttccggcacagatcgggccaatgcccatttcgatggatgcgtggttggtcaactcgcgaccgcagcaggagcactgaccagtcttccgaccgtaggcgactgccgattccatcggcttttcgaacatcttcagaacgtcgtcgtgctcagtatcggtgcagtcgcgactcttgatgaatttgccattggtgatccggccgaggtagatgtcgcccaggacgtacaggctaccggcgttccggctgtgagcgccagcctctttcacaacaacgatgagcggctcctcgccttcgccagctaggcggattttcgggcgcttgataccagactctttcgccttctcaaacgctttctcgatgccggaaatgtccagagtcggcgcagcagcttcctgcgcgaccactttctcgcgatacttggcgaggttttcgatggcgcgcttcgcagcagcgatctgattttctgtcaaggagccgtatttatacaacgactcctgaaggctctgagcgaagctgaaggaatttccagtccaccactcgatgatgtccgggtgcgcggcttcgaaggccttaattttgaggtcgcgctcttgcgcagcgctacagattttctcgatgcgcttttctgccgccttagcacggctcttggcgcgctgctccgggctggttttgtactctttgtatccgacgccgccgcaggcaaagcaggcgcgaccataagacgaagggccacggtacaggccggtgcctgcgcatttggtgcacttgtcgcgatacagcttcacttccttccgggagttcgggcgggcacccatggacacgtcttccagggtcttcggcgcttcgttgttgatctctacggtagcgaagtcatcacccaggtcttcgaagccggtgaacagattctctgctgcgttcatgtcgattctcctgtttggaaagttcgtttcgatgagttgactatacgccagaagtggaaaaacggtagcgatttctcactaccgttcgtcgggtcgaagacaatcaataaatgtcgctattgatcttgaacccatgctcagcgccgtcgttgtagtcgtactcaacataactgtcgcagtagtcgttcaaatgctgaatgatgccaagaacgtcgttcgcggccttgtgccttttcgcggcgatggtcttggcgatgctgtcgccgacttccaggatttcggccgtccggcgatggatcagcaggcgactccaaagatagagccggacgcgacgaataatgtcgcgatggcgctccagtcgtccgtgcaactcttcaatttcgtgctcgcgagattttaatactcgtcgaagctgttgaacttccaactccaaatcggccttagtagccatgttcacctcaaaaaggaaaatcgtctgggactccaggaagttcgacgattattgttgagcctgatcggtctagaatgcatccgaccgagccagccctgtgtggatagggtctacacgaactataacaggtgacttccctgactattcgccaggtcgatcctccacaccatctgcaaattggcgggcgcttcgacttcagttttcgttcgtccaggacggcgcgtctgtcgcaggaaaggcagcgtgccttaaccgacgtaaccatgggtatagtcgatcattcggatgagctcatcatcctctgattctctcgacttcagaccgcccaaagagtccgactggccgtcgcatttcgcatcgatatccatcgaagacaggaatcctgccgatactgcgatgatatcaactttgtcgccggccttcttgaagccttcgcactcagcatcgagggccacaattgcactcgcggccatgttcacatgactgatgaggtcggggaagatcacaggaacttcacgcgacatgccacggaccgtcagcttcaggactacatacttcatactcactatcccttttgtatgtgaggaaagaacttgctgttttccggatggtgaaaacgctcggtcgcaggcggtctttcttccggacattgaatcgtcgaaggcgggaaaaccgcgccggcgataatcgccgcgaggagtgcagcggatgtcgacatccagagggcggtttccaggctcacccgaacttccggacggcgcggcttcattcgctccaccctcttcccggttcataggatggtagactgccgccgcgaacccagttgtcccacatatggttcagaccagtcggtggctggggtggcggactgtagaatccgggagtctcagtgctgctcaggaaataaggcgtgcaaacggcctggacgaccaattggtgccgctcccacatcttatcaatcgctcttagcatgacgtcttcgcactgagccttactgtcgaaccgtctgctagtatggtccggcatctggacgcagccgtctccagtgcaaaggaaagcagtagcaatccatacggtgatactcgccatttcgtcaccctctttagttgatgagcagagtctattccatctgctcgccaggagtaaagcgcttttcgtcgggataaatgccgatgatgtctgcgtcgagcatccaaatctccacggacggatcgtcgctgctgatgtggtacaggttgtacagctcccgtccgccgacagcgcgctcgcctcgcggctcaaccgccagaaccttgccgtgcccttctccgtgctcgtccaggtatatgacgtgatcgccgacttcatagctttctttcgtgacgaggcgtgaacgcgagctgttctgcgattccaccacccaggaatccagcacgccgcctttcatgtcgcgaaacaatcttgccgatttgtcgcaatcgaatacgcccagaacttctccgtctttcaacacgatatgtacgattggcaaaagagtattcatgtttaatctccattggttgataattagagtctaatctgccgaaaagttcccgtaaagaattattttctcacaactgattagttgcaactgttaatctgatgtatatgtttgaatctcttttgaacgtttgatgtttcccctataataagcgcacacagccaacaaccacgtggaactacaatgtttaaactttcctggatattcgggcgcaaaaaggataatgctgcctgttctgaatcggcgccggagaaagtcgcacaaatccctcaacacgatccgctcgaccccatgatcaagctgggaaggattcgcggctggaacgtcgagccggagaaagccccggtcattcgtagtgtgaaagatttcctggaaccgggcctatctgtcgcaatggatagtgcgtatggtgatggaccaaccccggccgcgaaggctgctgcgggcggccagaatccctatgtcgtcccgactatgttgcaggactggtacaattcccaagggttcatcggataccaagcttgcgcaatcatttcccaacactggttggtggacaaagcttgttccatgtctggtgaagatgcagcacggaacggatgggaactcaaatcggacggcaggaagctatccgatgaacaaagtgcgctgatcgcccggcgcgacatggagtttcgcgtcaaagacaacctcgtcgaactcaacagattcaagaacgttttcggcgttcgtatcgcgctgttcgtcgtggagtctgacgatccggactactacgaaaagccgttcaatccggatggaatcacgcccggctcctacaagggaatctcccagatcgatccatactgggcaatgccgcagctcaccgctggctcgacggcagatccgtcttccgaacatttctatgagccggatttctggattatcagcggtaaaaaatatcaccgcagccacctagtggtggttcgtggaccgcagccgccagatatcctgaagcctacatacatcttcggcggtatcccgctcacccagagaatctatgagcgcgtgtatgcagcggaacggacggcgaacgaagccccgctgcttgccatgtcgaagcgaaccagcaccatccacgttgacgtggagaaggccatagcgaacgaagaggccttcaacgctcgcctggcgttctggatcgccaaccgtgataaccacggcgtgaaagttctgggaattgacgaaggcatggagcagttcgacacgaacctggccgacttcgacagcatcatcatgaaccaatatcagctggtcgcggccatcgccaagactccagccacgaagctcctcggcacttctccaaaaggattcaatgccactggtgagcacgaaacgatttcttatcacgaagaactggagtccattcaagagcacatattcgacccacttcttgaacgccactatttgcttctggcgaagtcggaagaaatcgatgtgcagctggaaatcgtctggaaccctgtggactccacgtccagccagcaacaagccgaattgaacaataagaaagccgcgaccgatgaaatctacatcaactctggcgttgtgtcgccggatgaagttcgcgagcgtctgcgtgacgatccgcgttccggctacaaccgactcaccgacgatcaggcagaaaccgaaccgggcatgtctccggaaaacctggccgaattcgagaaggccggtgcacagtcggccaaggcgaaaggcgaagccgagcgagccgaagcccaggcgggcgccgtagagggcgcaggcgcccctgttcccgccgctccacgcgggactaagcctctcgcgaaagcggccgaggaaggggccagcgaggtcgctgaaccgccgtcgcggccggaccccaaggccgagctgcggaacttgttggtcgatcttttgtcgaagctccaagacctggacgacattaaggcaccggatggcgtagacatagagcacaatgatgcgcctggcttaaagcgtacgtccaaacctggcgtgtctggcatggagccttcggtgttttcgtctaaccgcatcgtcgggcctcgtgatcattcggaactccagagaatcaaggtgaatggaataaccaccttgatcgaaaatccgcgcggaagcattcggcaaggaaaggatgggagttggcgagttcagatgaaacaccactacgggttcatcaagggaacgaaaggcgctgatggggatgaagtcgattgcttcgtcggtccgaatctgggatccaaacgggtcttcgtcgtcaaccaggtgaacaaggaaggtcagtttgacgagcacaagtgcatgctcggcttcaacaacatcaacgatgcgaagtctggatatctgtcctgcttccgtccgggctgggatggtctcggctccatccatgaagttgacctgcccgctttccgtcgctggctggcgaacggcgacaccaccaaaccattcgggggcgagtgatggcattcaaggcctccaaaaagcgcgagcgccgggcacctcttccagtcggaagagggaagcccataattccatcagcaggaatcgaggcctggtatcgaaagcagatgaaggatatttccaagctcatgatctccgactatcgaaacgagattgagaaggcgctgtcccagcctgcggccgaacggttcttcgccagcgacgaatccgtgaacgtcctgttcaagatgacccttcgaagcctacagcagcgatggagccgcatttttgaaggcttcgcggccaagatcgccccggagttcgtcaaccggaccgaagaagccgccaccgccgcgacccttcacagcttgtcggtggccggcgtcgatcagccacgagctgcgtataatgagagcgtcaggaacaccctggaggccgcaaccacttacaatcatactctcatcaccaagatccaagaggaagtccacgagaagatttacacatcagtaatgctgtctctgacttccccgaatccggaagagcaaggagcttccggcataactaacgcacttcgcaaagtcgggaagttttctgaagatcgaatcgaactcatcgcaagagatcaaaccagcaagctttacagttctctgagcgatgagagaatggcggaaaatggcgtcgaggagttcgagtggctacactcttctgccggcaagactcctcgccacacccacctggagaaagatgggaagaggttcaagctgaatgaccccagactttgggagggtccgaaagcagaccaggggccgccaggatgggcgattaactgtagatgcagaaagataccagtcatttgacatcgataggagcgctatatgccgttagttcatggcacttccaatgaggctcgttctgaaaacatcaagcgggaaatcgaagccggtaaagacccaaaacaggctgcggccatcgcttattccatccagcgcagtgagaaagggaagacggcgaaagattgttcgcctaagctcgtcgccgatcttcgcgccctggtggacgctctgtcgaggctcgtgaaatgaaccgcaagacgtgccggcgccgactcgtggtcgatgtaatcagggccaatattcacggcggattcttcagcctgaagtttgccgccatcgatttggcaatcatcggcttcgccatcttgatggcttttggccgataatgctgagaaaatctggattctgactaaaaattctagtccggatagccgcaaattaccgtttacggaaaatagcagtaatttggaaatcctactgccgcgaggctttaacagagccagttcctaatttccgatttagccgcatgcttcaaaagtatatagcctgggaaattagaagtaacgttccaatagaattcatctataagtaacgctataatataacgtcaatctatatactctagacgtattgaaattcaatttttaatcggtaaattggtaatttgaattagtttaggagttgaaagcctcgcggcagtaggcttagacaaatcccgtcaagtttccgagaccaaattaccggattttcgcggctgaggaaactggtaattagatcacaatacaaattataatgtaagttaacagtcgcggctacatctaattattgttccgcttatttacccttagatgtactgcgtatataatacagccatagtccacgactcttcgaattaacgatggcaaagtcgaaaagaaaaattgacgaaaatggatatatgaccatagagggctgcccgatcagctcttatggcgttttccaatattctgctggtcaactcggtcttccgggcgatccgacgcggattgtcaacgtatatcgcccggagtctgccgtcagcgatccggagtacatcgaatctctgaagaatctcccgttgatcgacgagcatgagatgctgtcgggattcgacgatgatgacgatagcgtggcccccgaagacaaaggggtggagggcatcatcacatccaacgcttactacgaagccccatgggcacgcggcgatatccgcatctattcccgcaacatgcagaatcagctggaaaggggcaaagaagacctgtccctaggctatagttgccgctacactgagcaacccggcatctggaacggaacgccttatgaagtcgtccaggacaagatgcgcggcaaccacattgccctggtaaaagagggtcgtgtgccgggggccagagtattggatggtctgtgttttgaccatctcagttttgatttcagaccatccgatgagggtaatgaaatgagtctcaagaaagccaagcggaagccccctgtccagcgcgtagggcaagctgctgactcggcggtcgaagagttgcgcgccctgtggccgaagctatctgcgtctgtccagaagttcctgggcgaagaagagcaggagccggagcatcaggaaggcgcagctccggccgaaccgaccgacagcgagcacctgaccgagcatccgactctggaaggtgctcagaaggatgacgaagagcaggaagaggagccttccgttgtcgatccggccgtggccgccgtcgagccggagcatcaagaaagcgccgcatccgaaatgtccggtgaaggcgaagtcgccgaactgatctctcaggtcaaagccattctggctcgactggagggcacggtagccgaaggggcagacgaagagcatggcgaaggtcaagatgtcgtcgagggcttggaggagcagagcagcctcagcggctcgcaaaccgccagcgacgatggtggtgagagcaaggataacagcgaggaacttcctgaaatggcacagaagaacgcgcaagatgctgcaattcgcggtctctatcgcgacattgctgctaaagatcgcctctacaagcgtcttagctccgtggttggtgcgttcgatcaccgagctatggactcggctgaagtcgctgtttacggcgtgaaaaagctgaacatcagctgtgcgaagggccaggaagctctggcgctcgacatgtacctgaaaggcgtcgaagcctcgcgcggcgcggccagccgtcaatcgaaagcccaggattcggccggttctgctccgcagtgtgccgagctggacagctacctgaagggggagtaactcatgttccagaaacaagtttaccgccagtacactcctggttttccgggcgatctgatcgaggacggcccgaagcgggcgcggccgggtcgaatcatggctctgtcggccgtaactccggctgccaccgccaccggccccaaccgcatcagtcgcgctttcggttatgccggtgacgtcagcgccctcggcgaaggtcagccgaagaccatcgcggctcgtgcttctgaagtcgtgatcggcggcgccaacttctttggtgtcctcggtcatccgaagcactatgctctgttcggttcggccggagactccctggctcccagctatgatctgcccgatggcgccgaaggcgagttcttcgatatggccaccggcctggtcgtcgaaattttcaacggcgccgcaaccgccctggacctggactatggtgacctggtcgcctatgtccccaacaacctggctaccgccgacaacgcgcttggcctgccggccggcgccctggttggcttcaaggctggctccatgccgaccggcttggtccagattcccaacgcacgcatcgttaacgccatcagtctgccggcccagtcggcggggaatctggttgctggcgttaccatcgtccagctcacgcagtaaggaggcgtcatgagccagatcagcaagacccattcgcgcctcgcaggccgcaatgcgaaacctttcgacctgaaaaacatcaccaatgacgccgtggcgtctctgcgccgcatcggcctggtattcgatcacgccgtcgtccaggaccagatcaaggccttggcgaaggccggcgcgttccgctccggctcggccatggacagcaacttcaccgccccggtgaccacgccgtccatcccgactcccatccagttcctgcagacctggttgccaggcttcgtgaaggtcatgaccgctgcacggaagatcgacgaaatcatcggcatcgataccgttggctcctgggaagatcaagaaatcgtccagggcatcgtggagccggccggcactgcggtggaatacggcgaccataccaacatcccgctgaccagctggaacgccaacttcgaacgccgcaccatcgttcgtggcgagctgggtatgatggtgggtaccctggaagagggtcgcgcctcggccatccgtctgaacagcgccgaaaccaagcgccaacaggcggccatcggtctggaaatcttccgcaacgccatcggtttctacggctggcagagcggcctgggcaaccgcacctatggtttcctgaacgatcccaacctgccggcattccagaccccgccgagccagggctggtccactgccgactgggcaggcatcatcggcgacatccgcgaggccgttcgccagctgcgtattcagagccaagatcagatcgatccgaaggcggaaaagatcaccctggccctggccaccagcaaggtggactacctgtcggtaaccacgccttacggcatttcggtttcggactggatcgaacagacctatccgaaaatgcggatcgtgtcggctccggaattgtccggcgtccagatgaaaaaccaagagccggaagatgctctggtgctcttcgtcgaagacgtgaacgcggccgtcgatggcagcaccgatggcggcagcgtgttcagccagctggtacagagcaagttcatcaccctgggtgtcgaaaagcgggcgaagtcgtacgtggaagacttctccaacggcaccgccggtgcgctgtgcaagcgtccgtgggctgtggtgcgctacctcggcatctaacagatgcctattcaccaaaggccgggcttccggcctttgttcactctgactctaactcggttgtaggggccggttagggcataattactaggactacgccaatgactgtttatatcgtttcctccatgactcaatcggtgtcttacaatgcgtatgacacctctgatccgtccaatcctcgcctccagcgaaagattctgattcgcggccgcgcaggcatcgcatccgaaacttccggcttcggcgacatgatttccgacgaggccggacgtccgatctggaccccacagggcgattgtactgccgtgagcgattcggatttcgagctgcttcaggccaataagattttcatgcgtcacatggagaagggttatctgcgagtcgtgaagaccgacatcaccagtgaccaccagcggatttccaaagagactcgcaccatggagcgcgatggattccagcctctggatgctactcgcctgcagcagaaaatcaaggtgaccacagccagcgcttcccaggaacaagagttccggatttaaccgagggtttcggtatggtgattttcgacgaacataagtttcgcacgctgtttccggagtttgctgatccagccgcttatccggacgtgcgcctgcagatgtacttcgacattgcgtgcgaattcatttctgatcgcgattcgccataccggattctcaatggtaaagccctggaagcctgtctgtatcttctgaccgcccacctcctgtcgctgtccacgatgcaagttcagggcgcggctggaggtggcgtcactgccggtgggacccagggcggtttcatcaccagcgctactgtcggcgaggtcagcgtggccaagctcgcgcccccggccaagaatggttggcagtggtggctttccgggacgccttatggtcaagagttgtgggcgctcctcagcgtcaaagcggtgggcggattctacatcggcggtcttccagagcgccgaggcttccggaaggttggagggacgttctggtgatccctggtgcgaatcttctgcgaatggccttcggggtcatcggtactcaaattgtgaaatatcgcaagtttgagcagcgagtgaagaatgatcaagctcagtacgtttccatgttcgaggagcctttcgacctggcagcgtctgttcagcgagtccgacgcgatcagtatgtccagtttaatctggagttccaacggaattacgttatgatcttcgccaactttgagatggttgacttggatcgcgatgtggccggtgaccagttcctctggaccggaagagtctttcagctggagtctcaaggctcctggttttatcaggacggctggggagtttgcctggccgtggatatcggtgcggccaagctcactgatgacgggaaaccgactttctaggtgatgtatgtttgacggcgaactgatagcgaaactggttgtcgagttgaatgcggcgatgacatctgctcaagaggctttgcagttcccggattttgaagtcgtccagaaagctcagccgacccaacagggaacgtcaaccaggccgaccatctttttccagaaactgtttgacattcctcgcggctggcctgccaccgattggcacctggacaacacggcccgcaaatatgtagaaataactcgacagcatgtagagacgactttccagatcagttcccttcattggcagaatcctgaaataactcacgtggttacggcttctgatatcgccaactatgtgagggcttatttccaagctcgatccacgattgagcgcgtaaaggaactggacttcctcattcttcgcgtgtctcaaatttccaacgaagcattcgagaacgacaatcaccagttcgaattccacccaagttttgacatggttgtaacttacaaccaatatattcgcctgtacgaaaacgcagcatattcggccgatggggtattaataggcatatgagtctgaggcgcgattcagagctaatcgccgcgcacctccagatgttaagagccatgcgcggcaggtccgtttcagccggatggtattccacggctcgatatcctgacaaggcaggcggatcggtcggaatacaagtcgcgagaatcgcacgtctcaatgagtacggcggaactatcgaccatccgggcgggaccaggtatattagggacgccattgttcggggtcggtttgttggcgttcggttcgtcagaaacgactttccgggagaaaccgaggtaactaagcatcacagaattaccatcccggctagaccgtttatgcgatatgcttggaacttgttttccgcagatcgcgccgcaatccagaaccggatagccatgaggctggccagaggacagatcactccagatcaagctcttgcccagatcggcctggcgttggaaggatacatagccagaagcatcaggaccgggccatgggtggctaactcagcatctacggtcaggagaaagggattcaacagaccgctggtcgatacggcgcacatgcttcaatcgattagcagcagagtaacataaccaggagatcatccagtgatcagtcagagccgttatatccggatcatttcgggcgtaggcgcaggcgctccggtcgcaggccgaaagctgattctgcgcgtcatgactaccaacaacgtcatcccgcccggaatcgtcatcgagttcgacaacgccaacgcagtcatgtcatacttcggcgcgcagtcggaagagtatcagcgggctgcggcttatttcaaattcatcagtaaaagcgtgaattcgccgtccagcatcagcttcgctcgctgggtaaacaccgccatcgcgccgatggttgttggtgacaatctgccgaagaccatcgccgatttcgccggcttctcagcaggggttctgaccatcatggtcggcgcggccgaacagaacatcaccgccatcgatacgtccgcagcgacttctatggacaacgtggcgtcgatcatccagaccgaaatccgcaagaacgccgacccgcagctggcccaggctaccgttacctggaatcagaacaccaaccagttcaccttggtcggcgccaccatcggcaccggcgtcctggctgtggcgaaatctgccgatccccaggacatgtccactgccctcggctggtccacctccaacgtcgtcaacgtcgccggccaggctgccgatcttcccgacgcggccgttgccaagagcaccaatgtcagcaacaacttcggttcgttcctgttcgccggtgcgccgctcgacaatgaccagatcaaggccgtgtcggcctggaacgcggctcagaacaaccagttcatctacacggtcgcaacttccctggcgaacctcggcactcttttcaccttggtgaatggaaacgccgggaccgccctgaacgtgctgtcggcgactgctgccaacgacttcgtggagcagtgccccagcgagattctggccgccaccaactacgatgagccgggcgcttcgcaaaactacatgtactaccaattccctggccgcaacatcaccgtttccgacgataccgttgcgaacaccgtcgacaagagccggggcaactacatcggcgtcacccaggccaatggccagcagctcgcgttctaccagcgcggcattctgtgcggcggtccgaccgatgctgtggacatgaacgtctatgccaacgaaatctggctgaagtcggctatcgctcaagcgctcctggacttgttcctgaacgtcaatgcggttccggcgagcagcactggcgaggcgatgaccctggcggtgctgcagccggttctggacaaggcgaccgccaacggcacgttcacctacggcaaggaaatcagcgccgtccagcagcagtacatcacccaagtcaccggtgatcgccgcgcctggcgtcaagtccaaaccctgggttactggatcaacatcaccttctccagctataccaacagcaacacaggcttgaccgagtggaaggccaactacacgctgatctattcgaagggcgatgccatccgcttcgtcgaaggatcggatgtgatgatctaatggtttgcggcggactcgatccgccgcgaccttccataaatggagtgaggaataagcaatgatcaacatttctgcgttcggctcgatctgccagttcacggcaagcagaactttcccgaacggattcaccgtcaccgagtttgccgacgatgcggaccccatcgacagcccgccgttcactgcggccgataccggcgtcggcctcaacggtgacatggtagtctggaaccgggcgaacatcctggaagtcgtcgttaacgtcattccgaataccgagggcgagcgcaacctggcagtcctgctggatgccaaccgcaccggaaaggacaagtcgggcgctcgtgatgtcgtcggcctggtcgtggcgatgccggacggcagcaaaatcacctgcaccaacggcaccccaatcgacggcgttctgatcaacgcggtggcaagcgtcggccgtctgaagaccaagccgtatcggttccgatttgaaaaagtgatcaaagccggtactagctgatgaagaaaattccgctgacagcagtccccaatcaagcgatctcatttaacgccggtagcagctattggaagattcgcctgtaccagaacatggacatgatgaatgccgatatcagccgcgacggcgtgatcgtttgccatggggttcgctgcttcggcgggattcctcttctccagtacagccatcagtaccgacctgactatggcaatttcgtcttcgaccgcgacgccgattggacattgttcggcgacggcatcaacctgttctatctggacggcgccgaattcgccgagtatcaggcgcttgccacgaggaaagaatgagcacatcaacgatcagaaccgggacgaacaacgatatccttttggacgacaatggaaacatggttatcctcagggatgtcgaagcgtgcgcccaggacgttcgggcggcgatgctcatgcgcaccggcgaaaacattttcgatgtgaactccggcgtgggatatttcgaatacatcttctcgccgcagaaaagctatgatgacgctcgcaaatccatcgcggatgcaattttatcctcgccggatgtgaccggcatcgagcagcttgacatcgacataaccggggaagtcttcggcgtcgatgcgaaagtcatcaccatccacgggcctgttaccacaggagtttgaaatgagtaccatccgcatccaatacgccaacggcacccaactgttcctggacggcaaaaatccgccgcccctggacccgctgccctcgtttaacccgtctgtcgaagatctggaaggcctggaccgcgaaaagaacatcgacaagggcgactcctcgccggccggtcttcccgttcccccggtaaacgtcgattccaatgtcgacaacggcggaaccatcccggctccggtatcgaccgacgctgctgcggccgaatcggccccagaaggcgcccaggaagctcctgcagcaggccaaggcgacgagaaaggcgccgaggaagccccgactacagccccggtagaaaaggccgaggaaacggcctcgccggccgctgaagaggaaaccccggctcccgccaaggccacctctcgcaaaaccaccagcaagtaaggactcgacatgatcaacgtcagcggcttcggcacaggaattgtaatagtttcagcctcatcgttcccgatggggttttccttgtcgaagttcgctgatgatgagagtccgatatcctccaaagagctggagccgttcggatatgagatgctttatgacggcggcctattcgcctttgacaaggctgctcctctggaagtatctgtatccgtcatcgcagggagcgaggatgatattaaccttcgcatccttctcaattccaaaaagggatcattcagatttcttccgggcagcatcccggatatgacgactctcgtggccactcttcctgatggcggccgcaccgttctgtccaatgggactatcatcaagggtccggccatcgacaccatacagaacaccggacgacgcaaaggcaacacgtacacttttgttttcggtagctatcttggcgcccagactgcgcgtcaagccatttctaacgttatccaatcggtgctggaggtggtctgatgttggggattttcaccagcctcctaagttcgcgatctttttcgattgtggaccaaaacacaaaccagctagttgctgcggatttgaggataagccgggtcaacacccggttttcttctgtagggcaacgccacatgctggaagatggtacgaccaagatggattccagaacgatccaccctatggaaatcatcgtcgaagtattttgcccttcaattgatgtcgtcgatcagatcaatcaattgctcctggatcgcgacacactgtacaaagtcatcactcgcggcatggtattcgaacggatgatgtgtaccagcgaagcgctcaatcagactccggatatgatatcggcgactcctgcgcggctgacattctcccaagttctcgtccagaatcccaagcctataatgttcagaaatgcaggggactcttctatgatcgaccgagggctggccctagctgaagacgtggttggctcggccggcgatctgttcgactacgcagtaaacggcgtccagaacgccgcagacttgttctgaggtgccaattgaactctttcctcaagtctattctcaacacgcctactctcaccatacgcaatgatgttaccaaacttcctgtctggaagagtcttcaagtcaagaaagtggaaatttactcgccggcttccgtagtgtcgaaacctctggcgacgaaagaccagacggaagctcaagtgtacaccgaagctctggacattgatgtgaagaatggaaagatcatccaaccggtgcgactccgcatcaatgctatctgtccggacctgtccaccgttgaaagtatcatgaacgctttcaatgataacacctcgactttcgctatcacttctaagtcgatattggccgataaaatggccatcatggcgctcgatgtagatcagtctccagacatgttgaacgcggctgagatcaatatggaattcgagcaggttgagcctccagtattgaatgaattcgatcctgcgttccctcaagatagtccgacttatggggtacagattcaatctctttctgatgctaatttgctggatttgggcgccatcggcgattcgatatcttcggccgcaaaatcgctatataatcgcgtgaccagctacttctgaggatgtatcatgcttgaaatcaatcttcccgatggccgtcaaactcgcgtacaaatcgaggcgtggtcggcattggatggctgggacctccagcgccgtttcgtcgaattcgctgtcagccaagattcagacttccgccgctctttcaccatggaaatcctgggctatgcgaaagtgctgcttggcgacgatgacgccggcattccgctgaccaccgcggcagtcatcaacaaccacctcggccactggaagaacgtggaactggttttcaactctgttctcaagcacaatggcatcgacccggccacgcacgccgaccggccggactattgggaacaagtcggatcgcagatggccatcgcatttctggccgaggcgtccaagctcattggtccagcaatgaagatcgccgaaggactcgccaacaagccggagtgattcatgtctagtgatttggatgaattcatacttcggtatgaggctgatactgccagagccgagcgcaatctggagcgcctccagaaccagatcaggcgcgtgaacagcgcatcgacgagtggccttcaggatttgcgccacttcgcagacggcgcggccaccgaactcggcagagtcgttccgcagattgattctgtgacgagcgcaattcgcggaatgaacgcgcaactggcaataggcgccactggcgtggccctggtcgcggccggcgtcaaggcgttcatgaacaccagggaccagtacaatcagcagcgcatccaggcgatggacatcggcatcgccccggcacgcttggaagagtaccagagaaaattcgttcgccagtccggtggaaccatcagccgcgagcagggcgcggagatgaccaaaaatctggcagacactttccggcgtgcttatcgcgatatcgggcgagtcggcccggaagcgcgaattctgcgtatggccggcgtcgatgtcgggagcttccaaaagggcatgcggccgctcaacgacatcatcaccgatctggccacgaaaatggccaagctgaagccggacgaaatttctgcctacgctgatgcccttggcgtctcgcgagattacctgagcaccctggcgaagatcggcccggccatgggaaaagtcactgagatgacgactgcggaactccagtccagggtccagggcgagtccaacatccagaaattcaacgatgccctggcgaatctcaaccagacgttcactaccctggaaaaccgagtcggcgaaaagctcgcgcctgcgttcaccaagctgatcgaaatcatcgacaagatagtccaggctattcccaatgaagtggaaagcttcgcgaaggacaccaaatcccgttgggaagatggagtgctcgggaaggcgaccgttggcagtgatatcctatccctcctcagccccggcgccctgctcggtcgcctggcagcgtgggggactcgtcgcggcatggaagaatcagggctcatcgacaaggacaaggttcccggcgctcaaaccagcgaagacctggccaagaaacaagaagaccaggacaaggctactaagtccatgaaagagctagagaagctggctgaccagaccacgaagtctaccaatgattttgcggtggcgatcaacatgttcagtggcgcggtatcgtcgttcgcgaatgccgttgacgagcgccaagcttgggcagcctgggcgggggaaattggtcgggcggtcggcatgggaagcaccgcgccgacttcgcgggccaccggcgtctatccgcacgcgatctatgatcagtcgaagagtggcgcggccggacaagtcttcggcgagccaatcggcgcccagtctcttcgcaatcgcatgttctcgccgcagcgcaaggcagagccggtcaccgttccatcgtacatcaacgatatcatcaaagatgcttcgaagatgtacaacattcctgagctggacatcaagaaactcatatacaccgaaagccgattcaacgccagggccaccagcgaagccggagcgaaaggcctcatgcaactgatgccggaaatcgccaaggcgtatggtatcactgacgtatatgaccctcgccagaacatcctcggcggaacgcgcctactgcgtgaaaacctagatcgagcaaatggcgacctgcggttggccttgacatactatcatggcggactcgatccgaagaactggggcccaaggactcgcgcatatccgggtttggtaatgagcgctccaatcgagctgatggaagaggctcagcgcaagcagaaggctgcggccatgaccgtcgccaacgagacgttcgccccggaaggcggcgacatggacattcgtccctatgatggcgggcgactggaaaccccagaccagggcaagaaggaagatgagcgccgcgaagcccgtcgatatgacgacagggttgtgcgaccggaaattcgcatcatcgaccgcatgccagaccgcagcgacggcgaaatcctcaagatgtctaggcgtcaagaggccgaccgggcagactctggattccggaagttcccgaatcaggttcgcggcgagaccaagcagaacatccaggcccaactcactgccggagccatcgcgcaagtgatcggcgttaaccccaaccagatcatgcgccgcgaaatcagccgttctgacttgctattcggatacaaccaagccatcctgggcaagcagcaggagatcaaggccgccgcgaccgaagccaacaacgtattcctgtctccagccaagctcgccgaagccactgccaaggtgaacgccgcatcgcgagaaatggatattctcaggacgtacggcgagcaacttctgaagagcgctccagagcgcggccaggagctgaccatcggtcgaatcgatatgttggtcaacgttaccggcgcgaattctccggaagaggctcgcgagatattcagcaagcagactgcagaccagctgactacggcaatccaagatgcccaaaacgattccgcaactaagatactctactgatgaaaaagagaattctgcgagtaacattcaacatgccttatggacccgaagtcatccgagaggatttggatgttcgggtccggatcatgaaggctgcgttgcggattcagaaccgggcgactatggaaattttcggcctaaccactcagctgcgtgagtctcttctgtcacagttcaccgcgtggaagcaccggcaacgtcaagtcggcagggaagacgaattgatgatcaaagtgtcggtggaagccggctactctgaccaggggcgcgagcaagtttccagagtctttgtcggcgaagtggccattgtcgatatcatttcgccgccaccggacattggaatccgcatccagtgctacaccaggcaaatcgacaggacgaagaccattcgaaatatgccgcccgccaacacgacgttcgtcaagttcgtcgagtggggcgcgaacgaaatgggattgaacttcatctgcgataccagttacaacgatcaagttctgaagaatccgggccggtctatcactgtcgcgtcggcaatcctggcgtcgattcaggatatgtacatgccggacgtggccgcgttcgttgatgatgacatcttgatcgtgaaggatcgcgataaagtcattcgccctgatgaggtgaccaacgtcaattcgttcgttggaattccatcttggtctgaatggggcgttgaattccagtgtctgtttgagccatcgattcgcgtggctggaggcgtggcggtcgaatcgctcatgaacccgagcgtcaatggcaactatgtaatcactgctctggaatacgatttggccagtcgggatcggccgttctatatcaaagtcatggggagcccagcagcataatggccagggaaatcaaaccgttcaacatgttcggcgttcactatacttcgcggcaattctctgctgtcgatgggctcagcatgatgtcggaaattcagagtgtgccgccagaagaactgctcaagggaaccagtgtattggcgcatccggaagatcatccggaaggcatctggcttcccttgaccgctgcgaacatcaatctttatgtagttgatcgggcgaaagtaatagctcccgtacaagttcttgcacttctgtccgaagtggtaattgactggaactttggtttcctcaaagactggaccggagtcaagattccatccagatttgtcgaagatatcaaaagcgtgaagacggcacattcgccttctgtagttgcgagtttggtagcgaacggctcagcctctatgcgcgagttggaagagtattattcgactcaagatgcatttaagatgatagacatcatgacggcgaagagcgtgaacgaggccttggcgtcagaggcatcgcacaacagaatcaaaaagggataattcctaaccgggcctgggaaggctatactagacctgccaaatcagaggctttcccatgtccaatatttctctaacatcagcaaaagctcccgacagaacgcgactgatcgccgctcttgacgctcggtcgcgacgggatgctctagatttcgaagtaatgataccggctcaggttgttcaatatgaccggaccgagaatatcgcgacgattcaacctctcatcacctgggttgacacggaacacaatgccgtccaaaggcaccagctggtggatattcctgtaatttccatgggggctggcggcttccacataagtttcccgattcagcaaggtgacataggctggatttatgcggccgaccgcgacacgtctcagttcctggagtcgttgtcaatgtcgaagccgaacaccggccgcatccataagttcgagcacggcctgttcatcccggacgtattccgtcgatacaccatcaattccgaagattcggccgctatggtcatacaatcaacttctggagcgaccagaatttcgattcgcggcgataacatcaagataactgcgccgtcgaacgttactgtggatactccgcaggcgaacttcaccggcaatgtgactatcgctaacaccctggtcgtaaacggcatcaacgtgaacaaccacggccacctcgaaaacaacccgcctgatgcccggacgaaaggcggcatggttgcttaaggagattttcatggcaagttttgatttttctgatttaacagcgggggggggttgtaatggctaactacaactacatcgtcgatactggtgtgatagtcgcagataccgccgacgttctgagcgacgttgaggccgagttccgcgccgccctcggtgccaatatcaacttggccgcgagcactccgcagggatcgcttgtcgcggccgaggccatcgcccgttccagtgtcatgcggaatgaagcgcgaattgccaataccataaacccgaacgtttcattcggaacgttcctggacgcgatctgtgccttgatggggatcgagcgcggttctgatctgtcaaccttcggctatggagttcaagtcaccggccgcagccaaacccgcatttccaccgggtctagggtccagactccggccggcgcgatcttcacagtgatgagcgatgtcacgatccctgctggtggtgtcgcgaccatcgatatcaaatcgcaggagtatggcaacattcctctgccggtcgggaatctcatcatcatcgacggaacaattggatggtccggagcaaaagtcatcgcctccactcgcgtcgatccgggcagccgccaaatgagcgatgcagagttgaagaatgcccgcgttaatcgattggccatccaaggccgcaactcgactatggccatcaaggcgtatgtgagcgccgttccaaacgtcacgtcggtgaacgtaatcgagaacaacaccggcgccgttcaagtggtgaatggagtctcgtttacccttccgtatgctgtttgggtctgcgtcgccggaaacccggataaacaagcagtcgccgatgcgttgtgggccgcccataacggcggaactccatgggactatggtgcgacgaacaacggcgtcccggtggacggtccgaatggcgttcctgtgcgcgatccggcgtccggtcgaaagtatgtcgtgaagtggaccactccaattatgtacgatggatatgttaacgtaacagtccagcaaggttcctcctctgtagctccggaagccattcagaacgcagtggtcaattacgcccaggggaaagtggaaggggaagaggggctggtggtgggcgcgagcctgtcggcattcgaagtcgccggcgccatcgctcgcgaaattcccggcatctacatcaaactctgccaggtcgcgtgcgtcgcggctggctcgccggctccggctccgggcgatttcacttcggaatacgtcatgagcgcattcggccaggctaccatttccgttggtaacgttcgggtgactttcgtatgactctgcctgcgtacaattcggacatccaacaagctctgaaatggctccataaccaggcgcctggaatcaccggcctgatccagagaaaggcgcaatggtatgacagattcagccgccaattctgggccaactgggagcgcgacgttttccaattgaaaactgccaacccgttcggccttatggtttggtgcatcatcctcggcacgccttcgaaagggttcggcctttatccaaaaaacagttcttgggcattcggtcggctacgccagaacttcatctatagcggtacacaagttccgccaccggcagacgcatcgcctggcggcaacttctacggtggcggcaatgccgaaattctcaacttggacgaaatcaggaaagtgcttcagctaagatatgtagcgctgatttctaacggctcgattgcatatgtcaatcgcatgcttcgttacatattcaatgatgatgagccatgggacgaggcgaccggtctgtacttctatctcatggactcaaccggcgagaatggccctgtggagaacttggcgatatatcggaaagattgggaaggtatggtgctgttgtccagttcgcccagaacgaaccacgtgctgacatcgacccctgccagcgacgccgattggccgggagtcgatccggccgcgagcggtattccggtaacggtcgaaacggcgtccgctacggccccggacggctccgctacggtgtgcaagcttactaagccggccgggagtaccgcttacgtctccgcgccgatagatgggccgctggggtccggtagcactgtaacgttctcgttcttcgcgaaagccggctccacccgtttcattgcaattcagtcggctgccgatttccccagtcgagccgatgccgttttcgacctggattccgggaacgtaatcagcgatcagatgctggacagcagcgtggtaagcgcccgaatgattcgtctggaaaatggctggtggcgttgcgttctcacgaccaagaccgtcagctcttcgttccgcgctgcttacgtcgctccggcagaaaccaacttcagctggattgattcgaattccagcgcggcgattgacgtgcttatctggggcgctcagatcgaactgggtgatactccaactggatacttggaaactaccggggcgcccgtaaccatgaccgattatgttttgcagaccgcccagaccggaacagtcaagttcacacagccccttccgaccggagtagaagcgtattggactggagactggaaaggcgggactgcagcagaaccggccagattcgcagtcgggaatgggactcaggatacgtttactctgtcagaccccgcatacatcggcctacccaccagtggggcgttcaagctagaatacagggttggtccggcgcttaatctgtcgccgcaattgatcaacctcatgaatgaccgggcagttggtattatgccgacttgcgccggttgcgatgtcaaagtcattcaggagtaatgacgtgatcacacccgacctgatccccagtccgtttgccgctcagggcgataaagacccgattccacaaacctcctccactggcttcgcaaaccttcgcgacggctatacgccggactacgaaatcagcctggcgtcgaacaacccgcaggccaaagcggtcgagcggaaaattcaaaaccaactcttcttcatcgcgacccagaacgcacaggcgtggcagcgacaaatggcaccgccgtggtttcagggcatgcctggcggctacgaacagaatgcagaagtcgtgcgcgtcggaaatgacggcataatgcggcgttatcgttccatggtgaatgccaatgcgagcgaccctctcagcagcacgacttgggaagaacaacccgcatggtcggcgatgcgctccaacatcccgatgccggccggaggcccaggcctatcttctggcggagaagtcatcacgaccggccgcaacttcaacgacctgttaaatgggacgtgggagttcttctctgattcagtggttatcgcttctcagaatgcccccgtatatccggcttccgctggtgccgctgctggcatgttggaggcgaaatcttgggtgtccggagccaatacgttctgcgtccaacgctacactgatcgcgtcgggaacgtcgctgtgcgcgggcttaatgccggagcgtggaccaactggatgtatgcggtaaacgtcatggcccttcaacaaggtcgggtcacctatggagtcgcggccggatcggcgaacgcttacacgttgacgctagttccgcagctccaaggcggcctggtggatggcatgattcttcgggtcaagttcaacaccatgaacaccggcgcctccaccatcaacgtctccggactcggcgccaaagccatcgtcggcgcggccaacttccctctcaccggcggcgaacttggccaaggactcatcgctgagcttgtattcgacgcagcaggcgaccgctggagaatcctcgcaggcgcgccacgcatccaagttggcaacgccgatcaagattaccaggcccccagctggaaacaggtgaaggattacgtcgcgtcccaaaagctgactgaagtggactgggctgacgtcgtcaacaagccgaacgtcgctatccaagacactacgccgtggttcgccaatctggagctgtctgacgctcggcctttcatcgatttccacttcaacaacaaccgcgccaaagacttcgactatcgctttatctctgaagctgatgggtcgatggcgttctactctcgccaggggtcagctggtcctacccaggatatcctgttcagcaggtcgaatgttacattcctccagccgcgactggatgttgcgaaaaacctcgcgtacatcgcgaactctggtcccctttggcagaacaccaccgccgatcagcccggctggaagttcactttcgcacaaggtgtggacgccaacaacaacgcggttatcgcagtcaataccaccaatccggacggctcctatcgctcacagatcatgcgatgggactgggcgtccacgaacgtcatattcaacaatcgtccgctctttgccggtcaatacactccttgggattctggaaactttgatccctccaccaagttgactgtgaatgccacgaaccaaatcgccggcccgaccgggattcggaatacaaacggcaacaccggcaacatgaacacatggggctccagttccacgacggcttcatacggaaacgctgctcttcaaatcttcgggaaaggtggtggcgagcctgccgcgctttatttcgacaactcccagacaggatggtatctggggatggacaaggatggacagctcaagcgggccggctggtcgctcggcaataacgcctacgtgattaccgacgaatccaacattcgtttccacgtgaattccatggctggcactcctgtttggggcggaaacgaattctgggggccgtggaactttaatccgaacaccaagctgaccatcaaagccggcacccaggaaactagcagcactgcgatattcagcggaactatgccattcgctccaatcgcatcgctgtccgattattctcaggcccctttgacggtttacaacgcgccaaccggtccgtctgcaaaaccggccgtcatcgcgttcattcgtcctggcaactggggcgcgttcttcggcatcgataccgacaacaagctgaaatggggcggcggatcgctcggcaacagttccagggaaatcgccgattccagcaacatcatgaatctttgggcggccaacccgaccgcgccgtcctggaacggccaaaccgtttggcgatccggaaactttgatccggcgacgaaagtggatttgaacgccgcgaacgccaccaacggcaacatgatcttcaaccgcatttctggaactggtagcggcatagcttcgtcaggtcgagttggcgccatcaacctgcagaatggggcgcattcggggcaagcggcagcagtcactttcgagcggggcggcagtatcttcgtcaacttcggcttggataccgacaacgttctcaaagtaggtggcggaaacctgggggcaaatgcctatccggtcatccacgccgggaactacaataactacatcaaccaggcgctggttcaggtgggtcttggcggagtcggttcctatggcatctttgcggttctggacaatgccgctccaaccgcgaccgttcaaccgggagtggttgtggacggttccattctcatctactcgtcttgcgccgcaaactacaatagcggccaaaggcctgccggaacttggcgctgcatgggatatgtagtcaaccgggatgccaacactcctgactccgcgacccttttccagcgagtgacgtaaaatgaaatggacgcggatcagaaaccctcgttggctggatgaaacaaacatccacgccatggtgactttcgaggggatcggggaagttcctttcactgccaatccgcacgacgtggaggcccacggaagggccatccacgctgcgatcctgtccggggagcacggacctatcgccccggtagattcgacgcgggagaaggccttgcaggacgctatacgagcaagggaaaagcgggctatccttcgcgatacccgctggcccatagatcgtcacgacgagcagaggcggctgggtatcgaaaccacggacggacctgggctgatagcagctcttgtttcctggaggcagcagattcgcgattggaatagcggggatcggccgcgacttcccatggctctgaaaacgatgtttaaaaatcaggagtattgatgaaaatcacgaaggatattctgatcaccggaaccggttgcaccacggatcgggcgatcaagtggctggatgatgtccaggcggctatggacaagttccacatcgagtcgccgcgagccattgcggcctacctagccaacatcggcgtcgagtccggtggactggtgagtctagtggagaatctcaactacagcgcccaaggattggccaacacatggccgcgccggtacgcagtagacccgcgagtccgcccgtatgtcccgaatgctctggcgaatcgtctggcccgaaacccggttgccatcgccaacaacgtgtacgcggatcgcatgggcaatggatgcgagcaggatggcgatggttggaagtatcgcgggcgcggcttaatccagctgaccgggaagtcgaactattctctgttcgccgaagactccggcatggacgttctggagaagccggagcttctggaaactccggccggcgcgtcgatgtcttcggcctggttcttctggcgcaatcgctgcatccccatggcggaatccaacaacttctccatggtcgtgaaaaccatcaacggcgccgcgccgaacgatgcgaaccatggccagctccggatcaaccgttatatgaagaccatcgccgcgatcaatcaaggctcctgatattcgcccaaaagaaaaggccgcttattcagcggcctttttgctttccggctttgcctcttcaaccatcttgacttcaaccggcgcggcggactcttcctgagtgaccgaatccacatagttccctagtgaactcagaacgccgattaacagcgctcttaccaccttgtccttgactgtctcgcctatgatcttggtcagaacggatattaactcttcccggagtctggggctgattcttggccgaaagcgcttgcgatgctctttgcgtttcatgtttagtcctctgtctgcggtcttctcctcaccccgataatggcttggggatgcgctgtgttaatcggaaggttcgggcgctattataactcgtcgaaaatgctcgcgcttaactgtttaacgatacgcaccgcgatattaaatcgccttctttctggccaaggaactctggcggccgggtccggtctaaggcctaatttgtcgacattaaaacgagaaaacccggatcgcctgtagggcaatgcgtccgggtttatttctatctagtgtacgctaggatcagtgacttccgccccacccgtccagccagcaatcgaagacggcgtgcctcggcttgtccttggcgccatgggagaagtgcttgaaccggatgacctggcccttgagatactccctgtcattccagcggcgctgtttctcgtcgtgggtcaggctggaggccgacacgttgaaagtgactccaggccacagacgttcgttgcggcagactaacgcaccgaccattccggacggcgacaggttttctgcgtggctggagcgggccgtgtggccaagttcattgatgaaagcttcattgttgttgtgcatcaactcttccacgtcgatgatctcagcttcatcgtagtcgtatcgcttgactttcacacagtgcccttccttggcagtcgagcgaccgaacttgtacagcccatcagcgcgcttgcccatggaaccttcgaatcccagcattgtgtggcggcgctcgacttcgctgaactgttcgatggaagtcaccagttcctgctcgaccaggtgaatcctctcatagccgaggcagtgacgaaggaagttcacgcgctcggccgccctggctaggcgatcttcggtcggtgcgcgaggatcggtgaaatcatcgaacacatggaaagaccagtccggctcaccgctgtggcggcgaagatcgccggacgacttctggaaaactttcgggtcgctgatgtcgccgcagaccagctcgccgtccaggccgttgaacagtttatcgctgaggtattcgtagatcgattgattgttctgccgcttgagttgacgagtcagcgcctcgccttcgaatacgaagcagcgaaatccatcgatcttcggcgagaaatacatcggcagttggccttccagcagcttcgggtcaaaattcgatgcgagcatgggtttcatacagttctccagaaaagaagcccggcgaaccgggctaaatggcggtaagccggctcagatggtttcgttggcgtggttcagttcggccatgatcgacgcatagcgctcgtccgactccttgatgaacacgccgtcgtacatgacgcctttgcgatccttgatggtgtcgtaggccgcagcgtagcaggcgagcatggtagtgtcgtgctcttccgtcacatcgaacagagtcatgacggccaagaccaggctcttgatggctaatccatgatttccgcgtgccagcgcgccggccagatgtccgaggtgctgcaaatcgtcgccgtaggtgggatgaacttcgacagtctcgctgaagaccgatagatgatcgaacagattttcaccgagttgcgcggccatgatcgtggcaaccaccattacgtcgccgatgccgtctttcacctcgactggtttgttataaacccaggcttcgcaaacttctgcgaactcttcgaccaacttcaggaattgatccttggccgaagagcctttgatcaggttccggtcggaaccccatttaacaaccaggtcgtgaagttcgcgactcatgatttgttcgatattcattctttcgattccttttggatttgggattttactgcgttgattatggacgccgtgctctggcgcgatccatccttggtggtgccgaagtagaaggccattaccgacttcagctcggcgaaccaatagccgatgatggtgccgatggcgacagaggatgtcgggtccatcagagcctcgcggccgaatgtgaagattgcgatgatgatgagaatggagcctgtcagaagagcgaatgtaatcgccgggcgaacgaaatcgttctgctgcgccgcaagcctcctcgcagaatccctgtcggccgcctctgcggcgaactggctaagctcggcctggagctggttctgctcagactgaaggcgattttgttcggcttgaatcgcaagctcctggagacgaacgcgctcggcgctctggagttcggcgagacgcgctagagcttccggattcgcgtctagagcgctagcgaccgaggctgggtcggccttcgaccccagcgccgtcgcgacgatagcgcccacggcggcgcctgcaggcccacccaggagcgaacccagagccggggcagccgcgccgatcttactacctatgtctttccagtccatttcgactcctcaaaagaaaggcgccattacagcgcctttctccggccggtgatttagaactcttcggcttcggtcgcatcgccgacgccaccggcgtcactgcgaggctgttcctgcttgctgtagtccaccttcacctcgccgccgacgaacgacttgtacaggtcggccgcagccttgaagtgatcctggttcttcaccaggccttccagctcgaactggacgccggaccagctacccttgtcgttcgacatgcctacggtggtcatgcggaccaggttggcgaaagtcggcggggtgcgcaggccctgcggggtctgaacctttttctgggacagcgcggtcatgagcttcttcgaggccttgatctgcgaagacgacagggagatcagagcctggccgaaatcgccggtgtccggatcgatgacgatgacgtaatgaccacgggtgtcggcgaagtagtcagacttcttgtcgctgaccgaaccgtcttcgttcggcgcgtacaggcgtccttcgacttccttcaccttggtcgggtctttcatcatttccttgaagtcttcgacgctgatggcgcccttgaaaccgccctcggcctcgcgaccggcccagcggatgaactcgcggcggtacgcggccggaatgatcagcaggccggtcttgccgtcgtaaatcttgccggtgacggtgttcaggaacatgccggccttcgcgccttcgatgtacttcgggtcatcttcatcgacctggggagacatcttctgcagaacctggatgaaggggatggcataggactcggcatcggcgccttcgaagcctgcgccgtcatacgatcccaaatccatgaagtcgggaacttcggtagttgcgacggcgccgccaccggtggcaactgctacggccttggtttcttcggttgcttcggaagtttcggttttcttaccagccatgttaggctccttgtttgtcgaatttcagttatcgctaactgtgggtttataataacggaagttgcaactaagtaaagcaaattacatattaagatttgctctttttcaccttcggtttcgtgattttggcctctttgtattcgtgcacgccgatgaaatctggcagctcttcgcccttctccaaatactcgcgaccgaacgcctggagggtctggtagtggacatcgcggttgatggtggcgtcatagccggcctcaatgatagcctcggccgccttcttcgcatcttccatttcgccgcgaccgaattcggccagaaccttggtcttgatgatgccgtcgttgtcggtttcttccagccacttccagaacttcgatttgttctcttctttgacggaaatgatggccttcggctctacttttaccgtgcgaccgtccgccagagtagtggtcttctgaccaagctcctccaacagctccggaatggtgttacgcttgagggtcttcagctcctcttccttttcggccagcgccttttgaagatcgaggatttcgccgtccagctgcgaagccttgtccaccaagttcagcagtcgatggccgatgtcggtggcttcaaccgccatttcatccatgacgccaaaatagtcgatttcgcccggcgcgttctctttcaagtattccgggatttcaagctcttgctctttcatgtccgcctccaacttagtgatgttcccttacttgaaccaagtattgagtagatattatgccgcatcttccttgatacggctactgatttacatattaaatttcgtcgcgagtgctaacgtcagcctcaaacacgccatcaacgacataacttgccaggttgcgtttccactccaagctgacctggattttctcgtcgatggaatccagacagatcaggtcgaagtacaaaaccgagttgacggtgccgattcggtgatttcggtcttcggactgcatccgcaactcgttgtcttcgtcggtcgtgtagtaaatggccacgtctgcggcggtgagcgtgatcccgatccctgctgcggccgggttgcccaggaacacctggacgcgcttggcctggaaatcgtcgatcaatttttcccgctcggcctctttggtctcgccgtagtatgtgccaaacgaaattccttgggcctccagatacgccttgatctggtcgatttcctgaatgcgcatggcccagatgatgatggagcgctccgggtcttcctccagcagaccctccagaagatcagtaaacacggcgaatcgcgggttgtcttcgggcggcaggatcaccggctcgccatagacgttgatatagccggatgcaacttgcttgagcttcgaacgcgctgccgcagcatcgaaagatacgtccagcatgaagtcttcgttcttgagaacgaagtggtagtcttcttccacgcgctggtaaacctttcgttgctccggcgacatttcgaagtatatgcgcttgtacaccttgtccggcaggaatgggagtgcttccttcttcgtgacccggaaactgtgcggctcgatcagagaccgcagcttgtccaggttccggaataccgggcgcccacactcgtctttttcgaccagttgcggcggcatggtttgcttcccttccagcttgcgcatgatagcgatcatgcgaggatcgtcacttggcaccagaacggaaaattcggccacgaacgcccgataggatttcgtcccaagaatgccatcgcgcaagaattggaactgcatgaacaaatcggtaggcgcccgcgttagaggagttccggaaagaatgcgacgggcaacggccttctcacccagctttacgatctttttcgcacgcttggcttgcgggtttttgatcctcgtggactcgtcaacaattgcgcaaaccttgaaagtttcaaggaatcgcaagacttcatcatagccagcctggtgattgatggcgtcaacgttgatggcgaagacgcgaagaactttttcatctgcgaacgtctcggcatacagacgatccaagcgcgccctggcctttttggaagtcggtcggccacgccaatccacgctcaaagtcttgatcgcgacgtgtgtgggaatctcgcgcagaatccagttagtgtggacccctttgggggcgacgatgagcagcgcgtcaacgcgcccctgtaggaagaggcgaacggcatcggccaaagtcgtccaagtcttcccggtgccctgctccatcaggtatgcgaaattccgtttgttcagggacgcggccagggcattgaactggtgctgcatggcctcggtcttcatgcccttgacgggatatgttttggctttcatttgttctccaaatcggcgaggaactgaacgatgttgtccagtccttctgcatagctcgcaacttccaccaaatcgcggctgttaagctcgaacaaatcgagcataggattcagcagcagccaatcggttccgatctttgccaggacaaagccccggccgccccagccgatccgctcccgaaggaatgggatttgcccaggctcgaaacatcttgccattgggcaggtggaggcgcgtttcggccactcctccaacgccttgaactcgacccagaactggacgcctcgacgattcaggcaaatcgaatcggacataccagaccgccgcgtctccagaaagtcgatcaggattcggccgagcgagcgttgcttaaacgtattcgccgctttcgtttcgcgatcattcatcgccttcgccctctttggaaactttcttagtttgctcttccagtttggccttctcgcgctcggtcaatatccgtttgatggccttcacgatgaacatgtcgatgccgctgagcttccagcctttgatcaggaaccaagagccggtcggcgtcccttcggctatctgctttccgtatcgcagatatttctcaggcctgatacggaatcggatttgttgatcaaccgaatcatccacacacatgatgtcgaggaactgcgactggcccttgtacaccgggtttttcccttggtcagccctcttcttctggcgaatcggttcgttctcatcggacagaactttcttcaccatcttgacgatgactaggccatcgtctccatcgcggatatcccgaatgttctgaatggggtttccggaagtcactccaaccagctccggattgtcataagcatgaccccagagcgtgtgagcttcgttcaagtctgcgaattgcacttcagaattcgacaaactagcggcgactttctcccaatcctgaagcgtcttcaggtgggagccggccagctccttatattgggccttcatctctttcagatcggcctttagctccttcagatcggccttcaacagtttctccagttctttgtctcggctgattttcgccgaaagaatctgggcttccagcgctgctacatcagcagccttgtcatcaacatcctgcgccgatatcgggcaattagccatggcgatccttgcggccttaacttcctcgcgaaggcgcaggaacctctcggctttcgccgggccgaagcctttggcgttcatgatgccgccgatcaggcgcccgtccgccactacccagttaagttcggaatgctccgggtccagggccgtatattctacgccttccttggccaattcgcgaaggatggacacagtttgctggtcgtctttcgccgcccgaagacacgcggccgcgtattccaggcgatgataccgcttcatgtagcaggtccagtacgtcaccacagcgtagctgaccgagtgggagcggttgaatccccaggcgccgaatgtcaccatttcctgccacacacggtgagcatcgtccggggcgacgcctatggtcttggcaccctcgatgaacaattcccggcgcttgttgaagaactcttcaccctttcgcgcagacatggctttccggattgccgatgtctgctcccagtcgaactgtccgatgtccttgacgatggacatgatctgttcctgatataggaagacgccgtacgtccctgacagatattgctcgacctgcggaatggtataggtcacaggctcgcggccggccacgcgctcgatatacttggtggccataccagaagacaacggacccggacgggcgagcgccgtgatgtggtcgatgttttcgaacgcggtgatattgatcgcgtttgcgaccgaacgaactgcctgcccttcgaactggaaaatgccggacattttgtcttcgttgagaacatccagaaccgccttgtcgttcaaaggcaagtcgtacaactcctgcgcagtcacacagttcgcgtcctggatgacgcccagagttcgaaggccgagcgcatcgatcttgaggagattcaaatattccgaatccggcttatcgagctgcgcgacgccttcagaagttaccgtacagaagtcgataacttcatcgttgcagaccaggatgcctgccgcgtgtacgccagagtgggatgggtgaatttcgaggtcgcccatgcaggcggacgcgatctcatacttttcgcggaagtcgcggccgggctgagttttctcgaaagtgtcctccaatccttttccatatcgttcgtccgccgacgtatattcaatgatcgagtttttgatgttgtctgtatcgtggaaggggatgccgaagcgctttccgacgtgagcgataaccgacgcggccttgagcgtgttgatgttgcccaacttcaccacgttccaagtgccatacttctgctggagatattcgaacactagatagcgatgggtatcggcgaagtcgatatctatatcgggaagatcggaccgggaaatgtcgataaagcgctggaagagaaggcgatgagggagcgggtcaacctcggtaatgccaaggagatagcagaccaaagagccggccgaagagccgcgagctgggccgaccagcatatgcttcttggcgaacgcgaccagatctgccacgaccaggaagtagctgtcgaaatctttcagctgaatctgcttgatctcttcttggaatcgatcctcatactcctgggtccattccttgatgtggccgcgactgagacggtaggcttgcccctcgcgagccagcgcgacgatatccccatccaggtggatcataggcgccttcgccagtttcacatccgccaattgttcgactaccgcacgagtattggcggcggcggcatcgaactcttcgcgagtcatgatgtggcgtaaacggctccacaactcctcttcggtggcgatgtggcgaaggccgaccgattcccgcaccttccaggccgacgcgaaatcagcatggtcgatggacggcatgtcgttgtaagaggtaattaccaccggctttccgaatgccctggccgtctccatagcgccgtgcgcggcgaccatcgacgcgggattgatgtcaatgtagtcgattccggccagatccagatgggcataggcctcgccagcgaatttgatgacgccgtcagcttcctggaattcttgcggagtcaatccttgattctggaccgacttggaagtcaagcggtagaacttcttggtgtccttggcgagcacccaggctttgagcttcagctctttctcgccatcgtcggcgcatttgatcgggatttccatgccgaatccgcgaggcagttctgccttggtagcggcttgttcccaacggacgtggccccatgttccatcatcgacgatggcgacgaatggggattcgatctctttggcgcgctcgatgatctccgggaatcgaccatatgcggcgccgtaggagtaaccagagcgaacgcggagctgagggaaagacatcatgcggcctccattgcttgatacgcccgatacactcccatgcgcttgcagacttcgtggagcagccgcacgtcgtcgagcgcccggtgtttctgtacatatgggccgcagtagtgctcataaagatgttgcagccgcatgcggtggccgaacaacggcgccgactcttccacagtacagatatcgagcgatgggaaattgacttcgtccaggccgaacttgccgcgagccagatcgcaggtcagcatgaacttatcgaatggcaggttgtgggcaatattcgcgtcggctctggaaaagaagtcgcgaactttctggcgctgatcgaggaaagatgggtgcttgatcaggtcttcgttcttcaacccggtgatcttggtgatgatttcctcgataacgattccaggattgcagatgaactctacttcatccaaaatcttttcgccatcagttatcacgccggcgaattcgatgattctcggctgctttctcagactcaccctttggtggaacgggagtcctgtggtctcagtatcccatacagcgaatatcatgtttgttccctcttatgtcgaaaggccggctgctttcgcgaccggcctgaggagtataccgcgacggctgaagatttacgccttctgtccgtctttcggcgtgatgcggccggagtgcatggtggcgtgaacaaacgccgaatagttgatcgagtccaaggccgaatcggcatccttgaacccgctattcgccaggcgagtgagtttgcccaccatatgcatcacgaacagggcgagccgatggtcatctgcggtcttcgccaccaggccgttcgggaagaggatttccatgatctttccgtacatcaggtcattgcgaccataggtgctctggcgggcgcggaagacttctgctgctgcgtacagattgttgaggacatcttccgcgaaatcatcgggatgagcgtcatcttcgccaggccagacggattccatggcgaacggcgcggcgtcttcggtcgggtcttcggactgagccgtttcagcgagcggagacggggctttcgcaaacgcctcgtcgagggtaggggcggagttcggggcggccgggaacggctcgcctgccatgttgtttggcgcgctatcggggtcgctatcggccgcgacggcgaagaacggcgcatcgcaaccttccaggttcaggatgtaggagtcgatccccaggctattgtaggcatcgatgatgtcctggcgatcatcgaacgccgcgacgatcttggtgacgccttcgattttcttcaggatgtcgagcgcgactgcccgcttgaactgaggtgccggctcggtgttaccatacggccgcatgatgagttcatactcgcgatgttcggcgatgccgagttcgcggtggagcttggccctggtctggaaaaagtggttgtcggttcggccggtgacgaagaaaatcatgaggtcggcgtcgatggcattcctgatgcgacctacagcgtgcgggttgagagtgtccttgtcgagacgagaatgatactcgtcccattgccgttccaaggcgaagctcttgcggtggctatcgtcgaatacgcagccgtccaggtcgaagatgatgatgccattctttggtttgcgttccatattcagatttccttactggttgctttctgggtgacggttttatcgatgaacgtcccatcagaagtgaggcggaaaacttcgccattctggatgaaatcgaacgattgcacgttcatcgtgatgcgaatggattcgctgccgttggtcacttcgacttgtgcgatgtcgccaactttctcgacaatgatcttcatgttacatggacttcccattgacggccacagggttggcctcttgtttttccgatccccagaaatcgcggcgcagttcttcctgctcggccgagcgatccatccaggggcgatagaacttgcactggtagataggttccaacggaacatcaatcacaggaatctgacctggcttcgtctccagagcggccatgaaccggtcataggatttctgctggatttcctcttcattcatcaccttcgacccatagcgcgggaaggcgcaggagccggtggcgacgcagtgcggctggagcaggctgtcgaacataggatagacttccagaaccagccggcgcatttcgcggaatacttcctgatattcaccctgggtccgaacgcacaggcgaaccttcgccatgtcgctgagagtccgcagattgaacttggccgcgatcttcgtttccatgttggaaggaatgattgcgcgagcgtcctggagcgacgcgccggcctccagcagcttctggtaacttgtctgcgcgtctgcgatggcgtcatgccacaggcggttcagctcttcgcggacgtggtaggtcgggtcatgctcgccattgaccgtagccggttcgtcgaattcccagcggaatgcttccggctgaacgacggcgctgatttccagagcgcgactggtttcctgctggtaagccccggtgcgagtccgaacgagttgatgggtgaaattcttgctgacgccctcgatctggaaaatgaagtccacgaactcgaacggcgagcggatggtgtccagcatgtacttccagtggtcgagcttttcggcctcggtcatggtcgccgggtcttggccgcgcatgcgggtggacttcgttcccaagagcaattcccaggcgttctgggtgtaactaatcagagaaatcttcatcagaaatcttccggaattggcgtgaagtggaatttttcggtgagagccagggccaggccttgggcttgctccctgttaaggccatactgctctatctcttccttgagcagttcgcaggcctccagacgcgcctcatactcttcagcctcatggacggatgagaagacggctccatcagaggttcggtacacaagttcgatcgccatggtgacctcagtagcagcggatgatttcggcgcggatgtcgcgacggtcgaggtagtgctcacgaatcttgtcgcgggcacgctcggcctcttcgcggctgccgaacgacaggttgaacgacgtgaaaggcttatcatccagttcagcgccggtctgatacaggattcctaccagaacgaaagacggcgcggtcttcggctgctggtcggtttgcagttcgagaaaggacatagggagacctcttcaggatgatctggtgcgtacattaatagcgctcctgctgagcagctacggtttccggctcatagatgagcatgtcaacgatttccgggcactggcctttcacccagtcgatggccgcgaccagtgcggtggaagcggagaaagagaaagtgcggtaagactcatggatgtacggcgaccccatggaatcgcgctcggtggtgcgcgaaatgactgctttgatattaacgatccggcccatcttcggcctccactttagcgattatatcggacaggcttaacttctcgccattcaggaaataactggcgcgaaacttcctgtcgccctctggcccgacgattcgggccgttattgtgagactcccgccgccaagggcatcggtgtccctgaagaaagctagcagcgcccgcttgagcgctgcttcgcgaggatcgacggccattaacctaccacgttccagccgtgctgagcgcaccacacggcaccggtccctgcaggaagactattcagaaggaacacaggagtcaggcggccatcctcggtcatatggacgaagtagcgggcgccttcaccgagccactcggccttggcgatggcacgttcgagattggccttggtggcgtaggtcttggtgtggttcttgtcggtggagaaggttacttcgcgggccatttgtagattccttttggttgaagggtttcgcgtttcgatgagggaatattacgcccacctgatccagaagtaaagcacttttgtaaattacttcacgaacattttcttggccttctgataagacgaagaagtcatcaggcgctcgatgacgtccatgtcagaaaccagatcgtccagaaggacgttgcgccaggtagcgaaccggccgagcgagaagatgccggcttcatgggtgagattccagatcatggattcgcgctcgtcgcggccgagcggaacgattttgcctttggtctggatggtcggctcgccgtcctcgatgagatgccttttcctgatgccgaaggccgcgcaaacgtaatccatatcccagtcgctgtcccattcgatggtttcgattttaccatctaaagtctccactatccccttagtgatggattcgacgatcagagtatcaccggtgatggacgctcgaaacgttcccactttaggaccagggaaatacacggtctggaagacatcacaggggatggaaagcttgtatcgactcacgatgatggaggttccttcaccgaatgacgggtcgattcccaggtccagccctgccgcagccagattggcgcggaacggcgcggtgctgatgatattcacgtggtcatcttgccggcgaagatactggaagaaagaggagtcgaaaggacggctccaagtgatacgattcgcaagcttagccaccagctgctcatagtagtcggccggtgcgatccaacgcttttcagtcgccagattccagatggaccggtccgacaggccgcccgttactttcctggagtacatgttgcagtggtcgatgcgcggctgggaaatgaactcgccgtcgaggtagatagctttgtgtacagtgacttcgcggaacgggatgccggtgagttggccaatcactggcgagcggaatcgcagaagtgcgttgtggcgctccttattctccggcgtcgccgcgtcgatgatttgggcttgaggaaagcgatgcgcggcgatcagtccggcgagtccggcacctacgatgattactttctgatcaggaatcatgatgtgtcccttatgagtgtacaaaacttgagaggataaaaaagggacccattttcatgagtcccttgaagagctagacgattcaggatcagaggagcggcggcttactcctcctcaccttcggaaccatcggcgccctgatcttcaccgtcgtgctcctggccttcgtcatcggccttctcgtcatcgccctggccagcttcgtcttccttcgaagcgatggcaaccagatcgacccagcccatgatttccagcttgctcaggtagctgcggaccgaagtgccatagagcagatgggccaccttttcgccgaaggattcgatttcgaccggctcaccaacggtgcagtgctcgttgatgtatgcgaacaccttgccgcgagtcgagaaggcctgcggagtgccatggccgtcgccggtcgggatgaagtgagtggcgcgggggcgacgcgagccgttggacttcaggtcttcgcggcgggcttcggccttcttgcggcgctcttcctgctcttccttgcggcgctgcttctcggcttcgcgctcagccttcttctgctcggccaggcgcttgcgctcttcttcgcgagcgactttctgagcttcctgggcggccttcttctcttcggcctttttggctcgctcggcttccttctcggccttcttctgctcgcgctcggcttccttggccttcgccttctcggcctgctcggcttccttcgccttggccttttcagcacgctcggcttccttggcggcggccttttccttcgccttctcggcgcgctcggcttccttcttctcacgctcggccttgcgcttctcttcgcgctcggctttcttctgttcggcttccttggccttggcctcggccttctcggcgcgctcgcgctctttacgttgacgctcagcggccttctcggccttgcgcagggcggctgcttgttccttggtcagctcttcgccttgggtctgctcgttctggtctttctgttccatgttcttactccgggaatgtttaaagggatggcttattggcctgtgaggggattatctctaaactaattgaagaagggaataccttagcctgaactttcctaaatattttctttcgggaaagtccagactccagggaacttatttatgttcgcgaagtttaactcttgcgcaaaaacaacaagtattcaactgcacgagttatgccagtatacatcaactgactataaggaattgacggtaagttttcttccagcattgcgactcgcttccattccgatccctgcgacttgtggaaagtcatcgcccaaccaaagtcgaatccgccaatggccttctgcgcctccagccgcacatcttcctcggccgaaaagctcaaaggattgaacttcacccagcgctcatagttcgtgccgataatgcgaactttggcaaacagcatttcatccggctcgtcatcatcttcttggccttcggggaccggcttgaagtccagcagaattgcttgctcgccgttcatgatgccatattcgtgctggttcccggtgcacaccagcttctcgccgatttccggttgtacacccttgtagccgaggatgcggcgcgccctggcgttcaagcggcggcgagtattgttgtaggcgcaaaggatcacgccatcgtcatccaggaacgtccgcatttcgtcgtccgacatatcgaagccagcccggactaggatatcatcatactcgcggcagggcaggcgtttgccctggcggacgaacatcgacgctcgaacgatattcccggcgttacgctcgatttcagtcatgactgtgtcgcagctatgttcgtggaaaacctgaacgccgcgcacagggggaacttggccaaagtcgccgatctccagaaccggaattcgatgcgccaacaagcgctcttcatcccactcaccggtcattgacgcctcgtcgagcacgaccaacttcggcttctcgtcgagcgagtctttattggcgaacatgatttcgccgtcttcatcctcgccaatcggccgatagatgaagctgtggagggtccgggcattgatacatcccttctcgcgaagccttgcggccgctttcccggtaggtgcgacgaagaccgtccagtccatcgagcagcaaagttcggcgatgatcttcgcgatggaagtcttaccagtaccagcgaagccggcgagtcgatagacctggcggcggtgcgctcgatcacaccaaccgcgataccagtccacaacggaattgatcgcgtcgatctgctggctgtttggccgaaaaccgaatcgctcttcgatctgatcgacggtgaagttagatgctgacatatttgcgttctccaacgctaggtttaattgaatcgagactcagtttaagcacgccgtccacagaccagccagtatcacgacgatacttgcggccttgcgggtcgacatagaagttcttcgtgcgccgcagcagaacatagtgccaagcagctccaagtgcgtggacccttcctttatacggaaaagccttcgcctgctctgcggcctccttggctccagggagccagcgtacggtcgaaaggaccaggaccgcacccttaatagcctgggaagcggcgcggccgtcctgtgggctatagcgatgtctatcgaagtctacccagtggtggttgccgcgccggagcttgaccgttcgggatcgcccctcgaacaccaccgtgccttcgtgagtaaaaatatgttccgccatcgaatgttcctttataacgtacagttatgctttacctctgcgcaggaagagtatactatcagctgactcgccaaagcgagcgaatttaatccaactttacttcggcaggaaagtggccgatactagcgccgccgcctgtactgccctccaaaacagaggatacattaaatgcaagaatgcaagatttcccgcgaccaactcccggtcggtaatccgaatcccaatgtcgacaagacccgcgacccgaacctgaagcccggtttcctgcgccgcagccgcgagctggacccggcgctggcagttcgcattcgtcgcgagctgatccacgccgaagcgtccgacttggccaaggccggatgggtcaattcacagtccagcctctatggatcgaaagccttcccgcgccattctgtagttcgcgtgaccggagttccggaagatggagctttcatcggcatgctgatcggcttcatcgagcaccgcgagcatggcgaatgggcggtcatggaagccggaacgaaagaaggcggcgccgtcatcattccagtcgatcacatcatgcgagcgtcattcgccgaagccgaagagttcgccgaaaagtgggagcggaacttggggtggcgtctcctgcgccagctccgcgagtgcggcgccctggccgggactgaagacgagttcctgcggcggatcatcaatcgatacgttcgtgatcgcacgatcctcgatcaccacaaagtcggcgcggacaaagactacactgatgcagtactcaaaagcatcggcgaaacatggccgaaaattccttcggggaaattcgtcggacaccgagtcgcgcagctcctgatcggccacaagctaggtcgagcggggaccatcctgaatgacctggtggacttcctggagaagttcgcggccgggcgcgataaagttctcaacatcgccatctgtaattgaggtgaatgatatggaagatttgggaaagctgagtccaaagctgagtcctcggcagcatgccgttctactggaaatgtacaggcatcctgagcatccagttcacagatcgccaacgaatttgactcttaaggctttgagacgaaaggggcttgtcgagctatcatggaaggattccgtggctggatatatgttcggtcgccaaccttgctggaacataactgatgccggcagaaggcgaatcctgggagtgctggggaatactatggacaaagagcaaagcgaagatcaccccagcattccggagttcgagaagatcgacgccaaaaaactttatgaggctctggagacgattgcggagctggagaagaagtgggacgaatccgaaaagcgcacacgcgatctggcagaattggagcagccgcaagtggttggctatcgcagcgcagcttctcgcatggtctatgaaaaggactatggactgcagaatcctgagccgatgatgcttgtttcccagcacgaccgcatagccggggcgctcctggctgatttggcgtccatgactaaagcgcgcaatcgctacaacgacctgtggaatcgtgctggtaaccgcctagctttggcgcaagttgaaatccgcaagctcacatcagagcgcgacgcagccctggccagggtcgcagaacttgaaaaggcactggcagaatccgaaaagcgcgggagcgaactggccgcgagctattgcgatggcgtgatcggcgatgaatacggccgccctcattgtcgttataaagtggagcgcgatgccgccctggccaagctcgcggaactggagaagccagaccctgactacacacaacacccgcagatcgtaggctacgctcgcaagaaagagttggagcctttgttggacccatgccaacctgacggcggccacatctacataggcttggaccatccgtcgctctggacagaagagccgccgtatgaatttcttactcccctctacaccgccccggtcgcccaagctcagcacagcgtgccggatgggtggaagctcgtaccgatggacccgacgtcgcaaatgacattagtcggccagtcactgcgttctgactcggtaaacagcatcggcgagatttaccggcaaatgctcgccgtagcgccctcacccatcgatccggccgcgcatcctcagccgtgccaacaaccacaggcccatcctgcccgctgcgggtgcgagcggtaagtgccaagcaaggagttcatgtaatggaacagcagaaaccttcggaagtagatggagccatcgccatgaccgatctcgacattcgcattcttcgaaaggcgaagccagaagcgcaggacgagtgcgccgtgtccatgttcgcagcagcgatccgccagaaactacagcgctcccgcgataaaggccgaggcggctggatcgactgcgacgaagacgttctgatcaacggattcgccgaacatgcgctgaaaggcaatgagaacaacctcctggacctggcgacgttcctgatgttcatgtgggtgcgcggcatcgacgatgcgaagattcccccggcgctcgaaaaggcgagacagcacaagatcatggaagcctggagtcgaatccatgaagatggcctaaactccgccagaaaggcgagtgctgcgcgacagttcgttggagtacctcgccgcaaaggaagaccggagcgacttgcatgaagcctcacgaaataagactggctcaggccgaagaattcctgcgagaactcggcagagggattccggacgacgaacgggtgatggtcggctacgctgaagaagccacagtccagaccgacgagaacggccgcaagctcaacgccggctggtggcctgtgccctggaaggaagggaaatacatcaactcccgatccaacgcctacgcctgtatatcgtcgtccatcaagacgcccaacccgaagacaggccagatgcggtactggcgcggcgaagcctctttcggccacggcctggcgttgatggtcgatgacatcggctccggcaaagggtccaagggtgacttcgaccgcgacgagttccgcgagcgactggagccgaccgcgattgtggagacttcgccgaacaattaccagttctggtatttcttcaaagagccgatgtcccacatgctccagttcaaggcgctgctctattcgttcgtggaccaggtgctaaagaaaggcggcgacaacacagtcaaggacgtcagccgttacggccggatgcccttcggcttcaacaacaagcgcgggaaagacggcaagttcaaatatgccgacgaaaacggcaagcccgaactcgtgcgcctgtacagcgccgactattccaagcgctactcgccggaagagatcgcccaggcctttggcgtccgcatcatcatgccacagatgaagaaggtggagataaaccgcgacgattgggtgtatgaccaagtatggctgaagtatgccgagcacatctgcacgaaatacaagatgggcgaagcggcaggcggccaggtccagcagaatatgtccggcaaataccgcatccgctgtccatggggcgacgagcacaccaacggcgatcctttcggagcatactttcgcggaccgatacctggcgccgagcacgaatatgtgttcggttgcgggcacgatacttgccgcaaagagcatcgccggacttgggcggccttcacggatgaagtcgtgctaccctatatcgtcgaacaattggaaagaatcaaccgccgtcatatcggtgaggagtagacaatatgcaaaacgatcctggaatcctgattaccgccatcggcttgctgttcctcggccttatcatcttcttcgaaggcctaaagggatggaaaatacaagtcgcaaacttcctcgcgtcgcttctgtgcttcttcttcggcctttctgctttgacgttctggttcgtcgttgcgtttgacgtattttaatcgacgaacggtacagaaattttcggatggggacggaacttattagctatgccggtttaggtaggagataatagccgtccctttcgcctcaatgtgtagaggcaatgttgaatccgatcatgtaaagcagaaggcggcaaacctaacatgattatcgacgaagataatatttttgatgatggcgaatcagggtccagtgagtttgatctcacgcagatagaagatgctggaatggaccctttgatgaccgccgcgagcaaggcggccgatgatgcgattgcgaggaacgaaacgcatcgcgcgcaaaaggcggcaagatacgccgaggcgtatgctgaaccagacttgaggaagcgagcgcggttgttgatgctcgaccaggcgttcgatcttccggtcagccgggtggtgaaagggccgttcgatgacttcatcacgaaatacagctcgacgtcagacagcaactacctcgcggtctatgatacgttgttctgtaagggcgacggaaccgtcccccacccgcacttcgacgagtttcgcggccggctggtggaccatcgcggcgtggcgttcaacaacaagaccctcgatccgattgacctgatgggcgccctcgcggctgcggccttggacgatccctcgattaagaagacgattgagacttgctgcgtttgggcgcgtcgatatcgccgcaactcgctgatcgagacgtttgagaagaagataccggagtgggatggcgaagcgcggatcgacacgttactgatcgacttgttcaagccgttcgacaccgagcttaaccggatggtgagcaagtatttctggctgagcttgtactgccgcatcaactaccctggaatttcggcgccgatctcgttggcgttgattggtgggcaggatgcggggaaatcatatttcggcttgttgatctgtaaggagttgtccggtgggcgcgatctggctccagttcagctcgacctgagccgacacgaccagacgccgttcctgcgcaacatcaccggcaactcggttattgcgaacgtcggcgaaatgtccggcttcaaaaagggcgacatggaacgcatcaaagaattcctggtgcgatcttcggatacattcgatcagaagtttgagcctggcgaaacgatcaagcgacaatggatcaccatcatggacggcaacggatacgatggactccagcgggacgactccggcaaccgtcgattctatccgatgttcgtggcacaacttcccgacgaagatggaaagccgaactgggtcaagccgggcgatggtaatgaaccgttcaaggtggacttcaccgacttcggtcgcaaattctggcaagcgatggctgaatgccgcgcatggatcgaagagcatggtgtcgatggatacttgaatatggtgtctgaagcgaaccgcgaagtgcagaacttctctatttcggaaatggagaatgcgcgtggcgtagttcgtgacgatacgattgacatgtatctgatcaatgttctgatcagttgcgagttcgaagagatcaagcctggcaggaatgccaagaatcctggatggagggctgacaccgtcgccattctgaaatggttcgatattctcgccaggaagaagccgatttctcgtcaccttactccgcacctgaaggcgctgggattcatcccgaataagaacggcctggctggttggtgcttacctgtcgataaggttgcacctggatggacgaatggcatgcacacgacgttgccgccgttcaatgatgcgcttgtgtacttgctgagaaagggcgacccggatatcactgatgaggctgccatggcaaaaattcgggcagtccgggccgagcgagccaagattttgggcgaggatttctgatgtagtggtggagtgtacttggactaggccgccttcgggcggtcttttctttggtgcggcgtacattcgattccggtggtggccgagtgagattcgaaagctatccggtaattagggtggggtggcgacggtgtattgtggaaagttcgtggacgttggatcgaggattttgtgtggtgagtggatgaattgtggaaaatcgacgattctgactggattttggggtcggccgcgtcgagcttaccggtaatttacgaaaccaggaattagggtcgagccttagtgccgcgtgggtttgaagggcttaaccggatactttccggtttcggatgcagccgcaaaagtatactacagcgaaaatcgattgcacaatcctaatagaaaaaatctatcacggacgttacctatctttaaaattaattaaattaatagtaatttggtaatttggtatactttggtatttgaaagcctcgcggcactaagcttgtacatatcccgtcaagtttccgattccagtcagctcgcggcagggtcgccggaaacttccggacttccaatccatgggtcgcggcaacaccacggcggactaagcggcaagtgccaaaactcgacgaacggaaccggaaatttgggagcgcgacagaatcgctcagctggacatatttctaacattcgatttaacactaaatccaaacactcaccaccatcgtctcccgccaaccgccgactcgatcctcacccaacagcggatcgcccgtataacatcctataacaccacctaacactcattcatcatcaaacccacccagacctacagcccacccacaagcagcccatagacgcgctccctggccccatagtacaatcgcgccatactcagtgtcgcggcagagcatcaggcccattcaccaaccaagccaccgcgacgactccagaatcgaactccagggacgcagcaccaaatgaccaaatactacagccccgacgatctagtcacgccacaggaattcgcagacccgcatttcgcggcgatcaaccagaagcgtttcgatctgtatatcgacctgcgcgtccaaggctacagctcctggcgggtcttccgggccatctggggcgaggagcacatggacggtcccgctcaggctcgcatcttcgcgatggagtccaacccgtactatcgcaagcagttcaaggccaagttgaacgcgaccaaaacgtccgacttgtggaacccaaagacggcgctccatgaactcctccaaatggttcgtgacccaacagtcaaggattccagccgtctgtcggccatcaaggaattgaacgttcttgctgaaatcacgttcgtggacgagtcgggcaagaccaggatcggtcgcggcctggcagacttctacgcatcggaagccgatgctcagactgccaccgtcgctgctgcagccgaagccaatggctatgtaccggaaggcgaagagggcgattttccgtctccgacgccggaaccgaccgaggaagaccgcgccaaccccatttagacataaaataacatcgttctaggcccgaatcggaccgaactaaggcgacggtagcgggaagggacgaaaaacgattctagggcggttctaggaagtcggagcctaaccctcagaaacgacaaagcccccggactctagctcagaatccgggggctttcttttgggcgccttattcgccagcttcgatgatttcgaagttgtatttgacgccttcgtgctcgaaagtcatcttgccagccgccttcagctgcatgcggaagcggatgtgtttcgaagaaggcaggccgaactcgatgaatgctgcgttggtggaccggaactcgccgcgcttgcctttgacggttacagccacgccatggcgctgggtgcgtttcttggaaacttccgggtctttccaggagttggcgatggctgccgacaggtctttggtctctttggccttctccggcgcgttcttggcctcttcgcgcatcttccggatttcttccagcgcttcctcttcggtgatctcttcttccggcttcagattctcttcctcggccttctcttcttccttcttcttggaagtgcgggttttgtaaacctttgccggggcttcctcttcctggaaggcttcttcctcggccggcagagcattcaggatggcgaggcagcgacgctcagcagtcttgcggtcagagaaacgcttgacagtcgcatcggcgttgtgggcgttgtagaaggcgaccagttctttcatttctgcgttctggatgtcgccgaaggttttgatggagttggtcattttgcgatcctctgttttggaagatttcgttcgggcttcggtttgtcgccccgttgaaagagattatgcctaggtcgatgctgcgtgtctacatttatttcatcagattgatcgcaaagccgacgaacggttgtcggatgtgaaaacaccgcagagcaggctgcggtgtttgttggcgagggcgatggtcaagcgaacggatcgcccagcatatcttcagacggggcacgttgcatatcgcccagcttgtcttcgtcagttgccggactggacgggatcgcgccggaccgaagcgacagagattccgactgcctgctcacctgcggagccggaggagccggaggagccggaggagcttttggcgcagtaggggcaggcgggaccggcaggcctggaggagccatcggcgccctgggaggttccggaagatcgggaagactcggcgctatgccgccaaaggaccgctgcgactgttgcgccggattgtcgccgaacatttcggcggatcggttgtccttgatgacttgacctatggccgtcttgtcgccgcccggctctgccggatcgaagcccgtgaatggagtggtaacgcagcgcatgttcggatgggtaggcagatttttcaggactatggaatctgcccagacatacggattcttgtggttgccgggtccgtggctgatgatctcggcaggaatatggccgttcatggtgagccattccgccatcccttgccgagtcagcgggcttaccacgatctggccagtagactcttcggcgacggcgaacagatcaccgagcttgaacccgatgattatgtagttggacctggactcgccgacgaaagccagggtttcgatgttgtggtggatatcttggtcttcccagatgtaaagcatgatgcgctcctcaataaggctgcttgttgtgttcgaccagagacataccggccggaactttgaagcggacgtattcgatcatcatcgccgttcgacgccgattcgtgccagactcgtcattaacgaagagttcgcactgatgcggaatgactcgcgtcaccaggtcttcgcctttcgaaccgtagaacttgatgtaggctgcgacgcctcgcgtcatgctcagatggatcgtttcgcagagtcgctgcgcggccgacgcgctggacagatcggtcggactgaccgtcacccagtaatggccactttgttctttatcggacataaactgcccctccaatgagaaagcctctgccgagtcgcagaggctggttgttagtcgcgcttcagcagaacgactttgtcatgcgctcgatacttcccgcgccagtcttcccagtattcgccggccgggcagacaagctccagagtgatttcgtcgcgccagcattcgacagaaagtacaatagccttgttccttgctgcggcatctgctctgcgcttaatcagaatttcgtcgccagttttcagctcatcaactcttacaactttggccatgacacactcctgtttgaagaggcgcggccggaaccaacccagccacgccgatggattaacgtttgtgaaggatggacacggtgtccacgtcgaggatgctgatggtacggcgacggcgcggattgctgcgttcatggatgcgaatcaggttcgcaactggagcttcgtccaccacccatacatcttcctgcttctgcgtccggagcaggaccgttacttctgtgttctgggcgaggccgttgcaaatgaacgtgaatttggacgagggagttctgtacatttcgagattcctttttggacttcgggtccggcttctcagccggtgaagagattatgccctgattctcaccgccgagtaaagcatttgtgtaccaattctcccgtcaggtggaaccaaagtgcggtatcgcttatggctacgctaccgcgccatggcccttcttgctcgcacactgcgaaccacaggctgatttccatccttgccaggactcggccgaaagattcgaacctgcgccgactggacaggatgtcgacattcactcgtcgattgacctcataccggcgaccgttgatgacgaagaccagccgcagggtttgtccgtcaagacactcccagtatctggtttcataccgaagccagtagcgctttccagccgggcctaccatggtcattgaatcgatgctcctggccgcgccacgcggtccggtcggcggcgcaggatcgaaccgccccaggatgtagtcgggccggcgcgcttcctgaggacacacggcgagaaggcgccatcctgcgtccagggcgtactggagttcgtccgtgcagcagtcttccttgagcagcagacggttgacgctctggagattcggaccagggatggccgagctggtgtgcgagttccaaccttcgatgccgtccaccatctgtggttggttgatgtagccttcggacctgccagccaaccggctcgcggccagctccaggcgctccagcatgggtcgcagagcagcttctgggtcaacgtcgtcccagagaaggaccaagctgatgatggtgtatggatagtccttgtccagatcccaggccgaagcggtcagacggcccaggccgatttcattacacatcacgggaacgtcgttgctccatgtggacggctcccagttccgctcaccaggattcccgattgttacgccttccaggttcccaaggagaacgtggagcttgctgacgtattccgcctccagcgctttccgctcttcgtcggtctggttgtggcgatagaaggatggagggctgacttttgcatggtagagtttcatggcggttcctcggtttttgaaggcttgaacgttagagaatggtgtcgcagtatttctcgaaaggactctggcgcttcttctcgcagatcgcgcaggtgatttccaggtcgggcagctcgctgcaagtcttgccgagatacagccagcgcttgcacagactgcggccgtccgacgtgaagaagtggactttgcgagcattgccgggttgcgcccagccaccttgatcgtttttgcgcttgctcatggcgatatttcctttggatctggaatccatgccgtccgttcgctcacccaaactccgtctacatagatcaggactgacagagcagtcgcgccaaacccgaagcctacatagaatgaaccgggatcgatttccatggtggcgctattggtggcgctattgaaatcgacttcaaagtcgaacatcgaatggccactcataccatcaccatgtcgatttcattgatgaagaaatgaacatcgacaccataagcgcgaccggtgtaacgcagccgagtcgtcccatcaatgtgggcttcctcgacgccgatgacttccaggatggtgtcgttgcagtaaagcttgacgaacatcttgatgccggagccaatcgccgcgaaggcgatctgcttgtacaggtcttgcttgatcatgctttgcgctcctgtttgcggatgtattctgccctggcttcggcttcgaacttcgcccaaagcgcgttgtcgactggaccccagggaccggtctgagtcccgtccaccggcgcgaacttgccaccggcgcgacgatacttggacagagttctcagaccgataattttctcttcttgggaatcgagttggacgatcatttgacatacttcccgaagtagcaggtgtggaggatttccaggcctttggagatagccttcagcttgatgccgaaattcttgatcgcccagtccagatcgtggtgatagaactcgatgatgttgacgatttggccggcgctgtagtggatgacgcgaaccttgccgttccagcggaaatcttcgcggctgtttacggcctcgacttcgatggtgtcgtttctgccgatggtccatttggagctagtcatgtcgcaatcctctttttggagtgtttcgcgtttcgatgaggtaactatacctcagtcacctcatcgagtaaagcacttttgaacatattatctgaagtttctggaagacagattcatcgggcgattcattcaatcaatggaaccgagactccatccgttgcgggcgaaggccgagcgaccagacagtttgcggcactggatggagctgccatcgtcgaaggtgtaggatacggcccagtccaggcgctcgcgacgtactgccgcagcagcgatatcttccagacgggctttgagaagttgttctgctttggtcatttcgagttcctctttggagcgcttcgggtttcgatgagatgactatacctcagtcatctcatcgagtaaagcacttctgaggaattatctgaagtttctggaggccagaaattgccgccagagccagtcaacgtgatcgttgagatagcgctcgccatcggacgacagagccaggcatccatcctttatgccgagtttggagccggaaatccattcgaactcgaactggagcgttcctgggcgagggatatgggacaggttgtacttttgcacggtcagtagtcctcgaaaggattcatgttggctatggccgcgactttctgcatgccgatgcgatagaattcggcctcttccctggccttgaccatctgctccctggcttcgcacgccagcttgtgctgattgttggcgttctggatgcttccgtccagactcctgtccagttcttcccgaagagccttctgcgacgctagctcggcctccaaatcctggattctgagatgaagctggcgatttctttccgcaacctcgttttcgcgagcgatggagttctgaaggcattcgtcaagacgagtattttcgcgcaccagttgatgcttttcgactttcgcctttcggcatgtctctcgcatcgctgaaagctcactggcgtgcaaatcagcgtccgggtctttacgctcttccttcgactccatccgcaggtagtactggccggctgcgaaggcgagcactgcctggtcggcatgctttacggcttcacccatgtagtgggtttcgtagcgaggccgaaacttacactcatctgcgtcccatagcagactatcggcaataggccagaatttgcggaagccatcaggatcgacttctacattgaccatttgcagctggccggcctccacttcgacttccagaggaacctgaatggtgccggtgatgtactggaagtacactatgctagacataacacaatcctcataagaagtcgcggccgggaccatcccagccgcatcgtaatcactcttcgccttcgtccgcgctcagccactcttcgaaggcgaaattcaccttcgactcgacccaatcctgcagctcatcggcgaactcgtcactgtcgatgtccatggtgattcccataacttccatgttccatagcgcggcgttcagttcaaactgcaccatctgctcgccatcgacttccagcaggattcggtctgcgacttcatagtcgtctacatcgaacagatggccgcccgccaggaggtgctggacgaaagcttcatcgaggttggtgacttcgatctggacttgtttggtcattttccgtctccttacttagcggctttgaattgggctttgaggttggccagttcagctttcagatcgatcatcgcctgaccgcgcaggccttccatttcggcctcgctgatcgcgatcttggctgcgcggattttgtcgttgatttgatctttagtcattttcggcttccttttgtttgaagggttttgcgtttcaatgaggagattatgccgaaagtcagaatggaagtaaagcatcttgatgagaaaatttctgcccaccgacgaacggtcgtgctcgaccgtcgatggagggtgtgcataatcgaagtcgcacgacgcgaccggtgatgccccggcgaaccggggcggggtggttaggcggtgcgctcggcggcgcgttctgcgttacggtcgtgcgccatgcgcgcccatactgcggcccagcgcgctttatcggcagagttcggcttgtacacgtcgtcagggtgcggttccgggccgtaggcgttgcagctttcgtcgtattcgtaggtcatcatcttgccctcaagggggtcatggcccggcgaaccgggcgggtgattacttgcgatatttcttaataaggtcgtgtgccatggcgatggcatcagaataggtttctccgccggcctccatttccttcacagccttattgcgcagtgcgttcagcttgttgccgttgatggtgcctttttcatccttggcagcttcgcaggagtcgcgcagagttttcagggcttggtaggtggcgttcatcgtcttgttctccgggtttcgcgtttcgatgaggagattatgccgatagtcagaatggaagtaaagtgtctgaatgaagaaatttctgaacaccgacgaacggttgcgctcgaccgtctgctgcggtgtcgatatactcggcctattgcgaacaatggactgattaa

SEQ ID NO: 12 - DNA, 65425 bp, Pbunavirus EPa13
  source 1..65425: mol_type = genomic DNA; note = EPa13
atgtacaaactcaaccctgcactgcgagcggtctggcgaactcgcgcccgttacaaagtcatttatggcggccgggcgtcttcgaagtcacacgacgcaggcggtatcgccgttttcctcgcggccaactacaagctaaagttcctctgtgctcgccagtttcagaaccgcatcagcgaatcggtctacacgttgatcaaggacaagatcgaaaactcagagtataatggcgaattcatcttcaccaagaactctatcaagcacaagagtaccgggtcagagttcctattctatgggatcgcccgtaacctgtcggaaatcaagtccaccgaaggcatcgacattctctggcttgaggaagctcactatctgacccaggagcaatgggaagtcatcgagccgaccatccggaaagagaactcagaaatctggatcatcttcaacccgaacgaagtgaccgacttcgtgtatcagaacttcgtggtcaagccaccgaaagattcctgcgtcaagatgatcaactggaatgaaaatccgttcctcagtgagacgatgctcaaagtcattcacgaagcatatgagcgcgaccgggagcaggccgagcacatttatggcgggattccgaagactggtggcgacaaatccgtcatcaatctcaagttcattcttgcggccatcgacgcccacaagaaactcggctgggagccggccggatcgaagcgcatcggcttcgacgttgcggacgacggcgaggatgcgaacgcaactacgctcatgcacggcaacgtcattatggaagtggacgaatgggacggcctggaagatgaactgctcaagtcgtccagccgcgtttacaacctggcgaagatgaaaggcgcctcggtcacttatgactccatcggtgtcggcgctcacgtcggatcgaagttcgccgagttgaacgatgccagtcccgacttcaaactgatctatgatccattcaacgcgggcggcgctgtcgataagcctgatgatatctacatgaagctgccgcacacgacgatcaagaacaaagaccacttcagcaacatcaaggcgcagaagtgggaagaagtcgcgacccgattccggaagacttatgaagcggttgagcatggaaaggtttatcccttcgacgaattgatttcgatcaactctgaaacgattcacccggacaaactaaatcaactgtgtatcgaactttcgtcgccgcgcaaagacctggacatgaacggccggttcaaagtcgagtctaagaaggatatgcgcgagaaacgcaagatcaagtcgccgaacatcgctgactcggtgattatgtcggccattctgccgatccggaagcccaaaggtttcttcgacttctaaacacagaaaagcccggatcgctccgggcttcgggtcttactcggtgtggttcctggcgctgagtgtcgacgcaacggcctcgccgactcccagggcttcctggccggccgcgagcgcttcggcttccgactcgacgatgaagtcatcaccttggccgtcgcctggcggaacctcgaccagcacggcttcttcgccttcgaaccgcaggtcataagtcttttcgacggacagtccgtaacgggcattgagcgcatcccagagctgagcttcatagttgcgcaggtcttgcagagatttctggtggctgagcatcgccatatcgacggcccgttgcagggtttcgtccaggacgttgaatcgcatgcgaagagaacgaatccgctcgaccacttccgcatccactacatgtctttcgatcatcgcttttcacctttgctgaatgttacgttgtagccattgtcggccaggtaggtcagggcgccttcgaaggaagttccgacaagatgcttgagctgcatttcgcgttgcgcggcgatccagaatgccgttccggagaactctgcgcggccttccgacaataccttgccatcaggcccgtcgatccgaacgtgaacggaagatagcttcagtaccatcaatgaatccctccactggcttgcgacggcatgctttcagcgcgagcggcttcacagtccgggcagggacaggcttggcggacgcgctccaactcgtcggcatccatgacatagagcttcccatcggaagtgtcgtgcgccatggcgatgttcgggaagtcggcagcgctcaggccggcgacagcgcggatttcgtcccagagcgccacatgctcggcattcaggcgagctgcgagcgcttcgtgctctttcgctacacgagccatgaactcgtccatccggaatgcgaattccgcatcgatggatcgggccgaggccatggagttgaggcgaatcggttctttcttcatggtaattctcttttggctgggggtttgtggtctcccaggcctattcaaagcctgggtagcatgatgctgaagatgaacaagaaggctgcaaacgccaatagcgttcctgtgagtattttggttcggctctgcagctcagcgtactccttggttgacagcccttgctgcgccgcctcggccgcgaaacgagctttcgcctcgataacttccgagcgcagcgacaggacatattctaaggcctcttcccgcgctttttcggcctcgaccgacctagggtcgcgggccgagacttcgctgtgccctggcctcgcgggatgggcctgcagcgatggaggaagttcggcggccacgactccatagtcggcgcaggcccaagcgatcccgatgaggatcgcgaggatggactggacgattcgcagcatcactttgtcgctaggaagacccatggttaatcctccaccgaccgaacgatttccatattgcgtccggcattggttccggcagcgtaggcgcgccgaccgtcactgtcttccagacgcatgagtttggtaacattcgacttcttgtaacccggatcgccgaaatgttcgtggaccgcagcttccttaaccaccaccagagacgttccggccgaagaaaccagttccatacgtttccgggtgattgatctgaggcgatagctgatttcctgggtcgcggccagtttgaattgcgcggcaacctttacgttgaaacgttcgtacccttgagccttctgatactcccgacacagacgatcaatggcctcgaccagggagttgaacatgttcaccgccagctcaacgtccgacttgtagcctttgaagcgtacggcatgaccccagcgcttggtagtgcttccgtcgcgggcactcctggatgccttagccgatgctctgtggttgttgatgccaccggcgaaatccatgatgcagtcattgtacgtcgccacggccactgagaaaaacttcatccagttcgggattgcggaatagtaacgagtggcaatttgctcatcgaactcttcgcgaatctcgccggtagcttcgaagtcgtgaaggtcatatttgtccttcaacttcttcacacgctcggctgcgatggccgcttcgtgcggactggaagagtcggctgccatggcggtcagtttgcggatgcggtctttcgccttctcgatggcttccggggtgaattcgttctggtcggtcatggtcggttccttttgtctgaagggtttcgcttttcaatggagctattctgccttcattcagaatggaagtaaagcactttcttccactatttcggcatcgactggaagaaattccagatccaatcacctgctaccagcaagaggatgagggcggcaaagaacaagacagcggccgcgagctgtgcgccaggcttcagtttgggatggctgagcttgggctctacgggaacggccggagcgctagcgctgcaaccggcgtctcctgggccgtagccgatgccgcgttcacacgcctggagcgacaccagggatttaagatactcggtctgcttttgcgactcttcgtagatgccggcgacggcgaaccagagggcgaacactacggacgtacacacaacccaggcgccggtcagcaggagggccagcgggccgatgacgaagacggtagcagccaggacgattgcgccgccccagatgatgaagccggccagaccattagtgatgtcgacacagaactttttcattttcagattccttcggttacgggatggaggggatttgaaactctgcgccgccgagaacatcaatgacgacttcccagagcgtcggaacagaccactggtaacggtcgaagtcggtttcaggatcgacgcccagcgtcacataggaagtggcaggccatttatgaacactgcctttccgcatgagagtcgccacgcggccgtcaccgagcggattcgtcctgtgcggaacgtacgcagacatcgaatattgctgcccggcgtcgataacaaatctttgcctctggcgcagacatacagagcccacaggattccagccgcgaccgccgcaagcctggcgagccgaagaatgctcataaccttcgtgagtcatttcgccgaggcaagccgagcgatcctcgtaatagttgatgttctccatcgatccaaccagcaccagagactcgaaatcgaatcgatgatcgtggatggccgagtgattgaagcaaagccgacgcggcagctccgggtgccaaacatggaggcgaccggccggaagttggacctgaatgaaccccaggccgtgcagagtgatcttgtccttcatcgggtcatggacggtgctcatggataatcctcagtagcagaaatgtattgtaagagttacgattgataagccggtcgcccatagaagggcgaaccaggccatggctttgatggtcgtgtagatcatccgaagaattttccggcacagatcgggccaatgcccatttcgatggatgcgtggttggtcaactcgcgaccgcagcaggagcactgaccagtcttccgaccgtaggcgactgccgattccatcggcttttcgaacatcttcagaacgtcgtcgtgctcagtatcggtgcagtcgcgactcttgatgaatttgccattggtgatccggccgaggtagatgtcgcccaggacgtacaggctaccggcgttccggctgtgagcgctagcctctttcacaacaacgatgagcggctcctcgccttcgccagctaggcggattttcgggcgcttgataccagactctttcgccttctcaaacgctttctcgatgccggaaatgtccagagtcggcgcagcagcttcctgcgcggccactttctcgcgatacttggcgaggttttcgatggcgcgcttcgcagcagcgatctgattttctgtcaaggagccgtatttatacaacgactcctgaaggctctgagcgaagctgaaggaatttccagtccaccactcgatgatgtccgggtgcgcggcttcgaaggccttaattttgaggtcgcgctcttgcgcagcgctacagattttctcgatgcgcttttctaccgccttagcacggctcttggcgcgctgctccgggctggttttatactctttgtatccgacgccgccgcaggcaaagcaggcgcgaccataagacgaagggccacggtacaggccggtgcctgcgcatttggtgcacttgtcgcgatacagcttcacttccttccgggagttcgggcgggcacccatggacacgtcttccagggtcttcggcgcttcgttgttgatctctacggtagcgaagtcatcacccaggtcttcgaagccggtgaacagattctctgctgcgttcatgtcgattctcctgtttggaaagttcgtttcgatgagttgactatacgccagaaatggaaaaacggtagcgatttctcactaccgttcgtcgggtcgaagacaatcaataaatgtcgctattgatcttgaacccatgctcagcgccgtcgttgtagtcgtactcagcatagctgtcgcagtagtcgttcaaatgctgaatgatgcctagaacgtcgttcgcggccttgtgccgtttcgcggcgatggtcttggcgatgctgtcgccgacttccagggtttcggccgtccggcgatggatcagcagacggctccaaagatagagccggacgcgacgaatgatgtctcgatggcgctccagtcgtccgtgcaactcttcaatttcttgctcgcgagatttcactactcgtcgaagctgctgaacttccagttccaaatcggccttagtagccatgttcacctcaaaaaggaaaatcgtctgggactccaggaagttcgacgattattgttgagcctgatcgatccagaatgcatccgaccgagccagccctgtggggatagggtctacacgaactataacaggtaacttccatgactattcgccaggtcgatcctccacaccatctacagactggtgggcgcttcgacttcagttttcgttcgtccaagacggcgcgtctgtcgcatgaaaggcagcgcgccttaaccgacgtaaccatgggtatagtcgatcattcggatgagaccatcatcctctgattccctcgacttcagaccgcccaaagagtccgactggccgttgcatttcgcatcgatatccatcgaagacaggaatcctgccgatactgcggtgatatcaactttgtcgccggccttcttgaagtcttcgcactcagcatcgagggccacaattgcactcgcggccatgttcacatgactgatgaggtcggggaagatcacaggaacttcacgcgacatgccacggaccgtcagcttcaggactacatacttcatactcactatcccttttgtatgtgaggaaagaacttgctgttttccggatggtgaaaacgctcggtcgcaggcggtctttcttccggacattgaatcgtcgaaggcgggaaaaccgcgccggcgataatcgccgcgaggagtgcagcggatgtcgacatccagagggcggtttccaggctcacccgaacttccggacggcgcggcttcattcgctccaccctcttcctggctcataggatggcagaccgccgccgcgaatccaattgtcccacatacggttcagaccagtcggtggctggggcggcggactgtagaatccgggagtctcagtgctgctcaggaaataaggtgtgcaaacggcctggacggccagttggtgccgctcccacatcttatcaatcgctcttagcatgacgtcttcgcactgagccttactgtcgaaccgtctgctagtatggtccggcatctggacgcagccgtctccagtgcaaaggaaagcagtagcaatccatacggtgatactcgccatttcgtcaccctctttagttgatgagcagagtctattccatctgctcgccaggagtaaagcgcttttcgtcgggataaatgccgatgatgtctgcgtcgagcatccaaatctccacggacggatcgtcgctgctgatttgatataggttgtacagctcccgtccgccgacagcacgctcgcctcgtggctcaaccgccagaaccttgccgtgtccttctccgtgctcgtccaggtatatgacgtgatcaccgacttcatagctttctttcgtgacgaggcgtgaacgcgagctgttctgcgattccaccatccaggaatctagcacgccgcctttcatgtcgcgaaacaatcttgccgatttgtcgcaatcgaatacgcccagaacttcgccgtctttcaacacgatatgtacgattggcaaaagagtattcatgtttaatctccattggttgataattagagtctaatctgccgaaaagttcccgtaaagaattattttctcataactgattagttgcaactgttaatctgatgtatatgtttgaatctcttttgaacgtttgatgtttcccctataataagcgcacacagtcaacaaccacgtggaactacaatgtttaaactttcctggatattcgggcgcaaaaaggataatgctgcctgttcggaatcggcgccggagaaagtcgcacaaatccctcaacacgatccgctcgaccccatgatcaagctgggaaggattcgcggctggaacgtcgagccggagaaaaccccggtcattcgtagtgtgaaagatttcctggagccgggcctatctgtagcgatggatagtgcgtatggtgatggaccaactccggccgcgaaggctgctgcgggcggccagaatccctatgtcgtcccgactatgttgcaggactggtacaattcccaagggtttatcggataccaagcttgcgcaatcatttcccagcactggttggtggacaaagcttgttccatgtctggggaagacgcagcacggaacggatgggaactcaaatcggacggcaggaagctatccgatgaacaaagcgcgctgatcgcccggcgcgacatggagtttcgcgtcaaagacaaccttgtcgaactcaacagattcaagaacgttttcggcgttcgtatcgcgctgttcgtcgtggagtctgacgatccggactactacgaaaagccgttcaatccggatggaatcacgcccggctcctacaagggaatctcccagatcgatccatactgggcaatgccgcagctcactgctggctcgacggcagatccgtcttccgaacatttctatgagccggatttctggattatcagcggcaaaaaatatcaccgcagccacctagtggtggttcgtggaccgcagccgccagatatcctgaagcctacatacatcttcggcggtatcccgctcacccagagaatctatgagcgcgtgtatgcagcggaacggacggcgaacgaagccccgctgcttgccatgtcgaagcgaaccagcaccatccacgttgacgtggagaaggccatcgcgaacgaagaggccttcaacgctcgcctggcgttctggatcgccaaccgtgataaccacggcgtgaaagttctgggaattgacgaaggcatggagcagttcgacacgaacctggccgacttcgacagcatcatcatgaaccaatatcagctggtcgcggccatcgccaagactccagccacgaagctcctcggcacttctccaaaaggattcaatgccactggtgagcacgaaacgatttcttatcacgaagaactggagtccattcaagagcacatattcgacccacttcttgaacgccactatttgcttctggcgaagtcggaagaaatcgatgtgcagctggaaatcgtctggaatcctgtagactccacgtccagccagcaacaagccgaattgaacaacaagaaagccgctaccgacgaaatctacatcaactctggcgttgtgtctccggatgaagttcgcgagcgtctgcgcgacgatccgcgttccggctacaaccgactcaccgacgatcaggcagaaaccgaaccgggcatgtctccggaaaacctggccgaattcgagaaggccggtgcacagtcgacaaaggcgaaaggcgaagccgagcgagccgaagcccaagcgggcgccgtagagggcgcaggcgggccagttcccgcagccccacgcgggactaagcccctcgcgaaagcggccgaggaaggggccagcgaggccgctgcaccgccgtcgcggccggaccccaaggccgagttacggaacttgctggccgatcttttgtcgaagctccaagatctggacgacattcaggcgccggacggcgtagacatagagcacaatgacgcgcctggcctgaagcgcacatcccaacctggcgtgtcgggcatggaaccttcggtgttttcgtccaaccgcatcgtcggtcctcgtgatcattcggaactccaaaggatcaaggttaatggaataaccaccttgatcgaaaatccgcgtggaagcattcggcaaggaaaggatgggagctggcgagttcagatgaaacatcactacggattcatcaagggaacgaaaggcgctgatggggatgaagtcgattgcttcgtcggtccgaatctgggctccaaacgggtcttcgtcgtcaaccaggtgaacaaggaagggcagtttgacgagcacaaatgcatgctcggcttcaacaacatcaatgacgcgaagtctggatatctgtcctgcttccgtccgggttgggatggtctcggctccatccacgaagttgacctgcccgctttccgtcgctggctggcgaacggcgacaccaccaaaccattcgggggcgagtgatggcattcaaggcctccaaaaagcgcgagcgccgggcacctcttccagttggaagagggaagcccataattccatcggcaggaatcgaggcctggtatcgaaagcagataaaggatatgtccaagctcatgatctccgactatcgaaacgagattgagaaggcgctgtcccagcctgcggccgaacggttcttcgccagagacgaatccgttaacgtcctgttcaagatgacccttcgaagcctacagcagcgatggagccgcatttttgaaggtttcgcggccaagatcgccccggagttcgtcaaccggaccgaagaagccgccactgctgcgacccttcacagcttgtcggtggccggcgtcgatcagccacgagctgcgtataatgagagcgtcaggaacaccctggaggccgcaaccacttacaatcatactctcatcaccaagatccaagaggaagtccacgagaagatttacacatcagtaatgctgtctctgacttccccgaatccggaagagcaaggaacttccggcataactaacgcacttcgcaaagtcgggaagttttctgaagatcgaatcgaactcatcgcaagagatcaaacaagcaagctttacagttctctgagcgatgagagaatggcggaaaatggagtcgaggagttcgagtggctacactcttctgccggcaagactcctcgccacacccacctggagaaagatgggaagaggttcaagctgaatgaccccagactttgggagggtccgaaagcagaccaggggccgccaggatgggcgattaactgtaggtgcagaaagataccgatcatttgatatcgataggagcgctatatgccgttagttcatggcacttccaatgaggctcgttctgaaaacatcaagcgggaaatcgaagccggtaaagacccaaagcaggctgcggccatcgcttattccatccagcgcagtgagaaagggaagacggcgaaagattgttcgcctgagctcgtcgccgatcttcgcgccctggtggacgctctgtcgaggctcgtgaaatgaaccgcaagacgtgccggcgccgactcgtggtcgatgtaatcagggccaatattcacggcggattcttcagcctgaagtttgccgccatcgatttggcaatcatcggcgtcgccatcttgatggcttttggccgataatgctgagaaaaatctggattctgactaaaaattctagtccggatagccgcaagttaccgtttacggaaaatagcagtaatttggaaatcctactgccgcgaggctttaacagagccagttcctaatttccgatttagccgcatgcttcaaaagtatatagcctgggaaattagaagtaacgttccaatagaattcatctataagtaacgttataatataacgtcaatctatatgctctagacgtattgaaattcaatttttaatcggtaaattggtaatttgaattagtttaggagttgaaagcctcgcggcagtaggcttagacaaatcccgtcaagtttccgagaccaaattaccggattttcgcgctgaggaaactggtaattagatcacaatacaaattataatgtaagttaacagtcacggctacatctaattattgttccgcttatttacccttagatgtactgcgtatataatacagccatagtccacgactcttcgaattaacgatggcaaagtcgaaaagaaaaattgacgaaaatggatatatgaccatagagggctgcccgatcagctcttatggcgttttccaatattctgctggtcaactcggtcttccgggcgatccgacgcggattgtcaacgtatatcgcccggagtctgccgtcagcgatccggagtacatcgaatctctgaagaatctcccgttgatcgacgagcatgagatgctgtcgggattcgacgatgatgacgatagcgtggcccccgaagacaaaggggtggagggcatcatcacatccaacgcttactacgaagccccatgggcacgcggcgatatccgcatctattcccgcaacatgcagaatcagctggaaaggggcaaagaagacctgtccctaggctatagttgccgctacactgagcaacccggcatctggaacgggacgccttatgaagtcgtccaggacaagatgcgcggcaaccacattgccctggtaaaagagggtcgtgtgccgggggccagagtattggatggtctgtgttttgaccatctcagttttgatttcagaccatccgatgagggtaatgaaatgagtctcaagaaagccaagcggaagccccctgtccagcgcgtagggcaagctgctgactcggcggtcgaagagttgcgcgccctgtggccgaagctatctgcgtctgtccagaagttcctgggcgaagaagagcaggagccggagcatcaggaaggcgcagctccggccgaaccgaccgacagcgagcacctgaccgagcatccgactctggaaggtgctcagaaggatgacgaagagcaggaagaggagccttccgttgtcgatccggccgtggccgccgtcgagccggagcatcaagaaagcgccgcatccgaaatgtccggtgaaggcgaagtcgccgaactgatctctcaggtcaaagccattctggctcgactggagggcgcggtagccgaaggggcagacgaagagcatggcgaaggtcaagatgtcgtcgagggcttggaggagcagagcagcctcagcggctcgcaaaccgccagcgacgatggtggtgagagcaaggataacagcgaggaacttcctgaaatggcacagaagaacgcgcaagatgctgcaattcgcggtctctatcgcgacattgctgctaaagatcgcctctacaagcgtcttagctccgtggttggtgcgttcgatcaccgagctatggactcggctgaagtcgctgtttacggcgtgaaaaagctgaacatcagctgtgcgaagggccaggaagctctggcgctcgacatgtacctgaaaggcgtcgaagcctcgcgcggcgcggccagccgtcaatcgaaagcccaggattcggccggttctgctccgcagtgcgccgagctggacagctacctgaagggggagtaactcatgttccagaaacaagtttaccgccagtacactcctggttttccgggcgatctgatcgaggacggcccgaagcgggcgcggccgggtcgaatcatgtctctgtctgccgtaaatccggctgccaccgccaccggccccaaccgcatcagtcgcgctttcggttacgccggtgacgtcagcgccctcggcgaaggtcagccgaagaccatcgcggctcgcgcttctgaagtcgtgatcggcggcgccaacttctttggtgtcctcggtcatccgaagcactatgcgctgttcggttcggccggcgactccctggctcccagctatgatctgcccgatggcgccgaaggcgagttcttcgacatggccaccggcctggtcgtcgaaattttcaacggcgccgcagccgccctggacctggactatggtgacctggtcgcctatgtccccaacaacctggctaccgccgacaacgcgcttggcctgccggccggcgccctggttggcttcaaggctggctccatgccgaccggcttggtccagattcccaacgcacgcatcgttaacgccatcagtctgccggcccagtcggcggggaatctggttgctggcgttaccatcgtccagctcacgcagtaaggaggcgtcatgagccagatcagcaagacccattcgcgcctcgcaggccgcaatgcgaaacctttcgacctgaagaacatcaccaatgatgccgtggcatctctgcgccgcatcggcctggtattcgatcacgccgtcgtccaggaccagatcaaggccttggcgaaggccggcgcgttccgctccggctcggccatggacagcaacttcaccgccccggtgaccacgccgtccatcccgactcccatccagttcctgcagacctggttgccaggcttcgtgaaggtcatgaccgctgcacggaagatcgacgaaatcatcggcatcgataccgttggctcctgggaagatcaagaaatcgtccagggcatcgtggagccggccggcactgcggtggaatacggcgaccataccaacatcccgctgaccagctggaacgccaacttcgaacgccgcaccatcgttcgtggcgagctgggtatgatggtgggtaccctggaagagggtcgcgcctcggccatccgtctgaacagcgccgaaaccaagcgccaacaggcggccatcggtctggaaatcttccgcaacgccatcggtttctacggctggcagagcggcctgggcaaccgcacctatggtttcctgaacgatcccaacctgccggcattccagaccccgccgagccagggctggtccactgccgactgggcaggcatcatcggcgacatccgcgaggccgttcgccagctgcgtattcagagccaagatcagatcgatccgaaggcggaaaagatcaccctggccctggccaccagcaaggtggactacctgtcggtaaccacgccttacggcatttcggtttcggactggatcgaacagacctatccgaaaatgcggatcgtgtcggctccggaattgtccggcgtccagatgaaaaaccaagagccggaagatgctctggtgctcttcgtcgaagacgtgaacgcggccgtcgatggcagcaccgatggcggcagcgtgttcagccagctggtacagagcaagttcatcaccctgggtgtcgaaaagcgggcgaagtcgtacgtggaagacttctccaacggcaccgccggtgcgctgtgcaagcgtccgtgggctgtggtgcgctacctcggcatctaacagatgcctattcaccaaaggccgggcttccggcctttgttcactctgactctaactcggttgtaggggccggttagggcataattactaggactacgcccatgactgtttatatcgtttcctccatgactcaatcggtgtcttacaatgcgtatgacacctctgatccgtccaatcctcgcctccagcgaaagattctgattcgcggccgcgcaggcatcgcatccgaaacttccggcttcggcgacatgatttccgacgaggccggacgtccgatctggaccccacagggcgattgtactgccgtgagcgattcggatttcgagctgcttcaggccaataagattttcatgcgtcacatggagaagggttatctgcgagtcgtgaagaccgacatcaccagtgaccaccagcggatttccaaagagactcgcaccatggagcgcgatggattccagcctctggatgctactcgcctgcagcagaaaatcaaggtgaccacagccagcgcttcccaggaacaagagttccggatttaaccgagggtttcggtatggtgattttcgacgaacataagtttcgcacgctgtttccggagtttgctgatccagccgcttatccggacgtgcgcctgcagatgtacttcgacattgcgtgcgaattcatttctgatcgcgattcgccataccggattctcaatggtaaagccctggaagcctgtctgtatcttctgaccgcccacctcctgtcgctgtccacgatgcaagttcagggcgcggctggaggtggcgtcactgccggtgggacccagggcggtttcatcaccagcgctactgtcggcgaggtcagcgtggccaagctcgcgcccccggccaagaatggttggcagtggtggctttccgggacgccttatggtcaagagttgtgggcgctcctcagcgtcaaagcggtgggcggattctacatcggcggtcttccagagcgccgaggcttccggaaggttggagggacgttctggtgatccctggtgcgaatcttctgcgaatggccttcggggtcatcggtactcaaattgtgaaatatcgcaagtttgagcagcgagtgaagaatgatcaagctcagtacgtttccatgttcgaggagcctttcgacctggcagcgtctgttcagcgagtccgacgcgatcagtatgtccagtttaatctggagttccaacggaattacgttatgatcttcgccaactttgagatggttgacttggatcgcgatgtggccggtgaccagttcctctggaccggaagagtctttcagctggagtctcaaggctcctggttttatcaggacggctggggagtttgcctggccgtggatatcggtgcggccaagctcactgatgacgggaaaccgactttctaggtgatgtatgtttgacggcgaactgatagcgaaactggttgtcgagttgaatgcggcgatgacatctgctcaagaggctttgcagttcccggattttgaagtcgtccagaaagctcagccgacccaacagggaacgccaaccaggccgaccatctttttccagaaactgtttgacattcctcgcggctggcctgccaccgattggcacctggacaacacggcccgcaaatatgtagaaataactcgacagcatgtagagacgactttccagatcagttcccttcattggcagaatcctgaaataactcacgtggttacggcttctgatatcgccaactatgtgagggcttatttccaagctcgatccacgattgagcgcgtaaaggaactggacttcctcattcttcgcgtgtctcaaatttccaacgaagcattcgagaacgacaatcaccagttcgaattccacccaagttttgacatggttgtaacttacaaccaatatattcgcctgtacgaaaacgcagcatattcggccgatggggtattaataggcatatgagtctgaggcgcgattcagagctaatcgccgcgcacctccagatgttaagagccatgcgcggcaggtccgtttcagccggatggtattccacggctcgatatcctgacaaggcaggcggatcggtcggaatacaagtcgcgagaatcgcacgtctcaatgagtacggcggaactatcgaccatccgggcgggaccaggtatattagggacgccattgttcggggccggtttgttggcgttcggttcgtcagaaacgactttccgggagaaaccgaggtaactaagcctcacagaattaccatcccggctagaccgtttatgcgatatgcttggaatctgttttccgcagatcgcgccgcaatccagaaccggatagccatgaggttggccagaggacagatcactccagatcaagctcttgcccagatcggcctggcattggaaggatacatagccagaagcatcaggaccgggccatgggtggctaactcagcatctacggtcaggagaaagggattcaacagaccgctggtcgatacggcgcacatgcttcaatcgattagcagcagagtaacataaccaggagatcatccagtgatcagtcagagccgttatatccggatcatttcgggcgtaggcgcaggcgctccggtcgcaggccgaaagctgattctgcgcgtcatgactaccaacaacgtcatcccgcccggaatcgtcatcgagttcgacaacgccaacgcagtcatgtcatacttcggcgcgcagtcggaagagtatcagcgggctgcggcttatttcaaattcatcagtaaaagcgtgaattcgccgtccagcatcagcttcgctcgctgggtaaacaccgccatcgcgccgatggttgttggtgacaatctgccgaagaccatcgccgatttcgccggcttctcagcaggggttctgaccatcatggtcggcgcggccgaacagaacatcaccgccatcgatacgtccgcagcgacttctatggacaacgtggcgtcgatcatccagaccgaaatccgcaagaacgccgacccgcagctggcccaggctaccgttacctggaatcagaacaccaaccagttcaccttggtcggcgccaccatcggcaccggcgtcctggctgtggcgaaatctgccgatccccaggacatgtccactgccctcggctggtccacctccaacgtcgtcaacgtcgccggccaggctgccgatcttcccgacgcggccgttgccaagagcaccaatgtcagcaacaacttcggttcgttcctgttcgccggtgcgccgctcgacaatgaccagatcaaggccgtgtcggcctggaacgcggctcagaacaaccagttcatctacacggtcgcaacttccctggcgaacctcggcactcttttcaccttggtgaatggcaacgccgggaccgccctgaacgtgctgtcggcgactgctgccaacgacttcgtggagcagtgccccagcgagattctggccgccaccaactacgatgagccgggcgcttcgcaaaactacatgtactaccaattccctggccgcaacatcaccgtttccgacgataccgttgcgaacaccgtcgacaagagccggggcaactacatcggcgtcacccaggccaatggccagcagctcgcgttctaccagcgcggcattctgtgcggcggtccgaccgatgctgtggacatgaacgtctatgccaacgaaatctggctgaagtcggctatcgctcaagcgctcctggacttgttcctgaacgtcaatgcggttccggcgagcagcactggcgaggcgatgaccctggcggtgctgcagccggttctggacaaggcgaccgccaacggcacgttcacctacggcaaggaaatcagcgccgtccagcagcagtacatcacccaagtcaccggtgatcgccgcgcctggcgtcaagtccaaaccctgggttactggatcaacatcaccttctccagctataccaacagcaacacaggcttgaccgagtggaaggccaactacacgctgatctattcgaagggcgatgccatccgcttcgtcgaaggatcggatgtgatgatctaatggtttgcggcggactcgatccgccgcgaccttccataaatggagtgaggaataagcaatgatcaacatttctgcgttcggctcgatctgccagttcacggcaagcagaactttcccgaacggattcaccgtcaccgagtttgccgacgatgcggaccccatcgacagcccgccgttcactgcggccgataccggcgtcggcctcaacggtgacatggtagtctggaaccgggcgaacatcctggaagtcgtcgttaacgtcattccgaataccgagggcgagcgcaacctggcagtcctgctggatgccaaccgcaccggaaaggacaagtcgggcgctcgtgatgtcgtcggcctggtcgtggcgatgccggacggcagcaaaatcacctgcaccaacggcaccccaatcgacggcgttctgatcaacgcggtggcaagcgtcggccgtctgaagaccaagccgtatcggttccgatttgaaaaagtgatcaaagccggtactagctgatgaagaaaattccgctgacagcagtccccaatcaagcgatctcatttaacgccggtagcagctattggaagattcgcctgtaccagaacatggacatgatgaatgccgatatcagccgcgacggcgtgatcgtttgccatggggttcgctgcttcggcgggattcctcttctccagtacagccatcagtaccgacctgactatggcaatttcgtcttcgaccgcgacgccgattggacattgttcggcgacggcatcaacctgttctatctggacggcgccgaattcgccgagtatcaggcgcttgccacgaggaaagaatgagcacatcaacgatcagaaccgggacgaacaacgatatccttttggacgacaatggaaacatggttatcctcagggatgtcgaagcgtgcgcccaggacgttcgggcggcgatgctcatgcgcaccggcgaaaacattttcgatgtgaactccggcgtgggatatttcgaatacatcttctcgccgcagaaaagctatgatgacgctcgcaaatccatcgcggatgcaattttatcctcgccggatgtgaccggcatcgagcagcttgacatcgacataaccggggaagtcttcggcgtcgatgcgaaagtcatcaccatccacgggcctgttaccacaggagtttgaaatgagtaccatccgcatccaatacgccaacggcacccaactgttcctggacggcaaaaatccgccgcccctggacccgctgccctcgtttaacccgtctgtcgaagatctggaaggcctggaccgcgaaaagaacatcgacaagggcgactcctcgccggccggtcttcccgttcccccggtaaacgtcgattccaatgtcgacaacggcggaaccatcccggctccggtatcgaccgacgctgctgcggccgaatcggccccggaaggcgcccaggaagctcctgcagcgggccaaggcgacgagaaaggcgccgaggaagccccgactacagccccggtagaaaaggccgaggaaacggcctcgccggccgctgaagaggaagccccggctcccgccaaggccacctctcgcaaaaccaccagcaagtaaggactcgacatgatcaacgtcagcggcttcggcacaggaattgtaatagtttccgcctcatcgttcccgatggggttttccttgtcgaagttcgctgatgatgagagtccgatatcctccaaagagctggagccgttcggatatgagatgctttatgacggcggcctattcgcctttgacaaggctgctcctctggaagtatctgtatccgtcatcgcagggagcgaggatgatattaaccttcgcatccttctcaattccaaaaagggatcattcagatttcttccgggcagcatcccggatatgacgactctcgtggccactcttcctgatggcggccgcaccgttctgtccaatgggactatcatcaagggtccggccatcgacaccatacagaacaccggacgacgcaaaggcaacacgtacacttttgttttcggtagctaccttggcgcccagactgcgcgtcaagccatttctaacgttatccaatcggtactggaggtggtctgatgttggggattttcaccagcctcctaagttcgcgatctttttcgattgtggaccaaaacacaaaccagctagttgctgcggatttgaggataagccgggtcaacacccggttttcttctgtagggcaacgccacatgctggaagatggtacgaccaagatggattccagaacgatccaccctatggaaatcatcgtcgaagtattttgcccttcaattgatgtcgtcgatcagatcaatcaattgctcctggatcgcgacacgctgtacaaagtcatcactcgcggcatggtattcgaacggatgatgtgtaccagcgaagcgctcaatcagactccggatatgatatcggcgactcctgcgcggctgacattctcccaagttctcgtccagaatcccaagcctataatgttcagaaatgcaggggactcttctatgatcgaccgagggctggccctagctgaagacgtggttggctcggccggcgatctgttcgactacgcagtaaacggcgtccagaacgccgcagacttgttctgaggtgccaattgaactctttcctcaagtctattctcaacacgcctactctcaccatacgcgatgatgtcaccaaacttcctgtctggaagagtcttcaagtcaagaaagtggaaatttactcgccggcttccgtagtgtcgaaacctctggcgacgaaagaccagacggaagctcaagtgtacaccgaagctctggacattgatgtgaagaatggaaagatcatccaaccggtgcgactccgcatcaatgctatctgtccggacctgtccaccgttgaaagtatcatgaacgctttcaatgataacacctcgactttcgctatcacttctaagtcgatattggccgataaaatggccatcatgacgctcgatgtagatcagtctccagacatgttgaacgcggctgagatcaatatggaattcgagcaggttgagcctccagtattgaatgaattcgatcctgcgttccctcaagatagtccgacttatggggtgcagattcaatctctttctgatgctaatttgctggatttgggcgccatcggcgattcgatatcttcggccgcaaaatcgctatataatcgcgtgaccagctacttctgaggatgtatcatgcttgaaatcaatcttcccgatggccgtcaaactcgcgtacaaatcgaggcgtggtcagcattggatggctgggacctccagcgccgtttcgtcgaatttgctgtcagccaagattccgacttccgccgctctttcaccatggaaatcctgggctatgcgaaagtgctgcttggcgacgatgacaccggcattccgctgaccaccgcggcagtcatcaacaaccacctcggccactggaagaacgtggaactggttttcaactctgttctcaagcacaatggcatcgacccggccacgcacgccgaccggccggactattgggaacaagtcggatcgcagatggccatcgcatttctggccgaggcgtccaagctcattggtccagcaatgaagatcgccgaaggactcgccaacaagccggagtgattcatgtctagtgatttggatgaattcatacttcggtatgaggccgatactgccagagccgagcgcaatctggagcgcctccagaaccagatcaggcgcgtgaacagcgcatcgacgagtggccttcaggatttgcgccacttcgcagacggcgcggccactgaactcggccgagtcgttccgcagatcgattctgtgacgagcgcgattcgcgggatgaacgcgcaactggcgataggcgccactggcgtggccctggtcgcggccggcgtcaaggcgttcatgaacaccagggaccagtacaatcagcagcgcatccaggcgatggacatcggcatcgccccggcacgcttggaagagtaccagagaaaattcgttcgccagtccggtggaaccatcagccgcgagcagggcgcggagatgaccaaaaatctggcagacactttccggcgtgcttatcgcgatatcgggcgagtcggcccggaagcgcgaattctgcgtatggccggcgttgatgtcgggagcttccaaaagggcatgcggccgctcaacgacatcattactgatctggccacgaaaatggccaagctgaagccggacgaaatttctgcctacgctgatgcccttggcgtctcgcgagactacctgagcaccctggctaagatcggcccagccatgggaaaagtcaccgagatgacgactgcggaactccagtccagggtccagggcgagtccaacattcagaaattcaacgatgctctggcgaatctcaaccagacgttcaccaccctggaaaaccgagtcggcgaaaagctcgcgcctgcgttcaccaagctgatcgaaatcatcgacaagatagtccaggctattcccaatgaagtggaagaattcgccaaggacaccaaagcccgctgggatgacggcatcaccggaaaggctacggttggtggtgatatcctttcccttctcagccctggcgccctgctaggccgcctggcctcctggggaactcggcgtgggatggaagaggcaggcctgatcgacaagtcgaaggttcccggcgctcaaaccagcgaagacctggccaagaaacaagaagaccaggacaaggctactaagtccatgaaagagctagagaagctggctgaccagaccacgaagtctaccaatgattttgcggtggcgatcaacatgttcagtggcgcggtatcgtcgttcgcgaatgccgttgacgagcgccaagcttgggcagcctgggcgggggaaattggtcgggcggtcggtatgggaagcaccgcgccgacttcgcgggcaaccggcgtctatccgcacgcgatctatgatcagtcgaagagtggcgcggccggacaagtcttcggcgagccaatcggcgcccagtctcttcgcaatcgcatgttctcgccgcagcgcaaggcagagccggtcaccgttccatcgtacatcaacgatatcatcaaagatgcttcgaagatgtacaacattcctgagctggacatcaagaaactcatatacaccgaaagccgattcaacgccagggccaccagcgaagccggagcgaaaggcctcatgcaactgatgccggaaatcgccaaggcgtatggtatcactgacgtatatgaccctcgccagaacatcctcggcggaacgcgcctactgcgtgaaaacctagatcgagcaaatggcgacatgcggttggccttgacctactatcatggcggactcgatccgaagaactggggcccaaggactcgcgcatatccgggtttggtaatgagcgctccaatcgagctgatggaagaggctcagcgcaagcagaaggctgcggccatgaccgtcgccaacgagacgttcgccccggaaggcggcgacatggacattcgtccctatgatggcgggcgactggaaaccccagaccagggcaagaaggaagatgagcgccgcgaagcccgtcgatatgacgacagggttgtgcgaccggaaattcgcatcatcgaccgcatgccagaccgcagcgacggcgaaatcctcaagatgtctagacgtcaagaggccgaccgggcagattctggattccggaagttcccgaatcaagttcgcggcgagaccaagcagaacatccaggctcaactcactgcaggagccatcgcgcaagtgatcggcgttaaccccaaccagatcatgcgccgcgaaatcagccgttctgacttgctgttcggatacaaccaagccatcctgggcaagcaacaggagatcaaggccgccgcgaccgaagccaacaacgtattcctgtctccagccaagcttgccgaagccacggccaaggtgaacgccgcatcgcgagaaatggatattctcaggacgtacggcgagcaacttctgaagagcgctccagagcgcggccaggagctgaccatcggtcggatcgacatgttggtcaacgtcaccggcgcgaattctccggaagaggctcgtgagatattcagcaagcagactgcagaccagctgactacggcaatccaggacgctcaaaacgattccgcaactaagatactctactgatgaaaaagagaattctgcgagtaacattcaacatgccttatggacccgaagtcatccgcgaagatctggatgttcgggtccggattatgaaggctgcgttgcggattcagaaccgggcgacgatggaaattttcggcctcaccactcagcttcgcgagtctcttctgtcgcagttcaccgcgtggaagcatcggcaacgtcaagtgggcatggaagatgaattgatgatcaaggtgtcggtggaagccggctactctgaccaggggcgcgagcaagtttccagagtctttgtcggcgaagttgccattgtcgatatcatttctccgccaccggacattggaatccgcatccagtgctataccaggcaaatcgacaggacgaagaccattcggaatatgccgcccgccaacacgacgtttgtcaagttcgtcgagtggggcgcgaacgaaatgggattgaacttcatctgcgataccagttacaacgatcaagttctgaagaatccgggccggtctatcactgtcgcgtcggcaatcctggcgtcgattcaggatatgtacatgccggacgtggccgcgttcgtcgatgacgacatattgatcgtgaaggaccgcgataaagtcattcgtccggatgaggtgaccaacgtcaactcgtttgttggaattccatcttggtctgaatggggcgtggaattccagtgtctgtttgagccatcgattcgtgtggctggaggcgtagcggtcgaatctctcatgaatccaagtgttaatggtaactatgtaataactgctctggaatacgatttggccagtcgggatcggccgttctatatcaaagtcatggggagtccagcagcataatggccagggaaatcaaatcattcaacatgttcggagttcactatacttcgcggcaattctctgctgtcgatgggctcagcatgatgtcggaaattcagagcgtgccgccagaagaattgctcaagggtactgatgtattggcgcatccggaagaccatccggaaggcatctggcttccattgactgctgcgaacatcaatctttatgtcgttgatcgagcgaaagtaatagctcccgtacaagttcttgcacttctgtccgaagtggtaatcgactggaactttggttttctcaaagactggaccggagtcaagattccatccagatttgtcgaagatatcaaaagcgtgaagacggcacattcaccttctgtagttgcgagcttggtcgcgaacggctcagcctctatgcgcgagttggaagagtattattcgactcaagatgcgtttaagatgatagacatcatgacggcgaagagcgtgaacgaggccttggcgtccgaagcatcgcacaacagaatcaaaaaggtataattcctaaccgggcctgggaaggctatactagacctgccaaatcagaggctttcccatgtccaatatatctctaacatccgcaaaagctcccgacaggacgcgactgatcgctgctcttgacgctcggtcgcggcgggacgcgctcgactttgaagtcatgattcccgcccaggttgttcaatatgatcgggccgaaaatatcgctacaatccaacccctcatcacctgggtcgatacggaacacaatgccgtccagcggcatcaactggttgatataccggtgatttccatgggcgctggcggtttccacataagtttcccgatccagcagggggatatcggctggatttacgcggccgaccgcgacacctcacagttcttggagtcgctatcgatgtcgaagccgaacaccggccgcatccacaaatttgagcatggtatgttcataccggacgtattccgccgatataccatcaattctgaagactcggcagcgatggtcatccaatcgactagtggagcgacccgaatttccattcgcggcgacaacatcaagatcactgcgccgtcgaatgtcaccgtggatactccgcaggcgaatttcactggaagcgtgactatcgccaacaccctggttgtaaacggcgtcaacgtgaacaaccacggccacctcgaaaacaacccgcctgatgcccggacgaaaggcggcatgattgcttaaggagattttcatggcaagttttgatttttctgatttaacagcgggggggggttgtaatggctaactacaactacatcgtcgatactggtgtgatagtcgcagataccgccgacgttctgagcgacgttgaggccgagttccgcgccgccctcggtgccaatatcaacttggccgcgagcactccgcagggatcgcttgtcgcggccgaggccattgcccgttccagcgtcatgcggaatgaagcgcgaattgccaataccataaacccgaacgtttcattcggaacgttcctggacgcgatctgtgcgctgatgggaatcgagcgcggctctgatctttcgacgttcggctatggcgtcaaagtgaccggccgcagccagacccgaatttccaccgggtcgcgtgtgcagactccggccggagcgattttcacggtcatgagtgacgttctgattccggcaaccggagtcgccaccatcgacgtaaaatcgcaggaatatggtaacatccctcttcccgtaggaaatctgatcatcatcgatggaaccatcggttgggccggagcgaaagtaatcgcttcaactcgcgtcgatcctggcagccgccaaatgagcgatgcagagttgaagaatgcccgcgttaatcgattggccatccaaggccgcaactcgactatggccatcaaggcgtatgtgagcgccgttccaaacgtcacgtcggtgaacgtaatcgagaacaacaccggcgccgttcaagtggtgaatggagtctcgtttacccttccgtatgctgtttgggtctgcgtcgccggaaacccggataaacaagcagtcgccgatgcgttgtgggccgcccataacggcggaactccatgggactatggtgcgacgaacaacggcgtcccggtggacggtccgaatggcgttcctgtgcgcgatccggcgtccggtcgaaagtatgtcgtgaagtggaccactccaatcatgtacgatggatatgttaacgtaacagtccagcaaggttcctcctctgtagctccggaagccattcagaacgcagtggtcaattacgcccaggggaaagtggaaggagaagaggggctggtggtgggcgcgagcctgtcggcattcgaagtcgccggagccatcgctcgcgaaattcccggcatctacatcaaactctgccaggtcgcgtgcgtcgcggctggctcgccggctccggctccgggcgatttcacttcggaatacgtcatgagcgcattcggccaggctaccatttccgttggtaacgttcgggtgactttcgtatgactctgcctgcgtacaattcggacatccaacaagctctgaaatggctccataaccaggcgcctggaatcaccggcctgatccagagaaaggcgcaatggtatgacagattcagccgccaattctgggccaactgggagcgcgacgttttcaacttgaagaccgccaacccgttcggccttatggtttggtgcatcatcctcggcacgccttcgaaagggttcggcctttatccaaaaaacagttcttgggcattcggtcggctacgccagaacttcatctatagcggtacacaagttccgccaccggcagacgcatcgcctggcggcaacttctacggtggcggcaatgccgaaattctcaacttggacgaaatcaggaaagtgcttcagctgagatatgtagcgctgatttcgaacggctcgattgcatatatcaatcgcatgcttcggtatatcttcaacgatgatgagccgtgggacgaggcggcagggttgtacttctacctcatggactcgaccggcgagaatggtcctgtggaggatttggccgtatatcggaaagattgggaagggatggttttattgtatagctcgcccaggacgaaccatgtgctgatatcgacccctgccagcgacgccgattggccaggagtcgatccggccgcgagcggaattccggtaacggtcgaaacggcgtccgctacggccccggacggctccgctacggtgtgcaagcttactaagccggccgggagtaccgcttacgtctccgcgccgatagatgggacgctggggtccggtagcactgtaacgttctcgttcttcgcgaaagccggctccacccgtttcattgcaattcagtcggctgccgatttccccagtcgagccgatgccgttttcgacctggattccgggaacgtgatcagcgatcagatgttggacagcagcgtggtaagcgcccgaatgattcgtctggaaaatggctggtggcgttgcgttctcacgaccaagaccgtcagctcttcgttccgcgctgcttacgtcgctccggcagaaaccaacttcagctggattgattcgaattccagcgcggcgattgacgtgcttatctggggcgctcagatcgaactgggtgatactccaactggatacttggagactaccggaacgcccgtaaccatcaccgattacgttctgcagagcgcccagaccggaatggtcaagttcacacagcctcttccgacaggagtagaagcgtattggactggagactggaaaggtgggtctgcgaccgagccggccagattcgcagtaggggatgggactcaagatacattcaatctgtccagccctgcatacatcggcctacccactagtggggcgttcaagctagaatacagagttggtccggcgcttaatttgtcgccgcaattgatcaacctcatgaatgaccgggcggtcggtatcatgccgacttgcgccggttgcgatgtaaaagtcattcaggagtaatgacgtgatcacacccgaactgatacccagtccgtttgctgcgcagggcgacaaagacccgatcccgcagacctcttccactggctttgccaaccttcgcgacggctacacgccggactacgaaatcagcctggcgtcgaacaacccgcaggccaaagcggtcgagcgaaagattcaaaaccaactcttcttcatcgcgacccagaatgcgcaagcctggcagcgtcaaatggcgccgccgtggtttcagggtatgcccggtgggtatgaacggaacgccgaagtcgtgcgcgtcggcaatgacggaatcatgcggcgctatcgctccatggtgaacgccaacgccagcgatcctctcagcagtaccacctgggaagagcaacccgcctggtcagttatgcgcaccaacataccgatgccggctggcggccccggcctgtcttcgggcggcgaagtcatcaccaccggccgcaacttcaatgaattgctgaacggaacctgggaatttttctctgatgcaatcgtcgtggcctctcagaacgctccggtgtatccggcgtctgccggcgcagcagcaggaatgctggaggcgaaatcttgggtgtccgggtcaaatacgttctgcgtccaacgctacactgatcgcgtcggaaacgtcgccgtgcgcgggctcaatgccggggcctggaccaactggatgtacgctgtaaacgtcatggccctccaacacggccgtgtaacctatggaatcgcggccggtccggcgaatgcctacaccttgactctcgttccgcagatccaaggtggtttggtagatggcatgatccttcgggtcaagttcaacaccatgaacaccggcgctactaccatcaacgtctccggactcggcgccaaagccatcgtcggcgcggccaacttccctctcactggcggcgaacttggccaaggactcatcgctgagcttgtcttcgacgcagcaggcgaccgctggaggattctggcaggcgcgccgcgcatccaagtcggcaacgccgatcaggactaccaggcgccgagttggaagcaagttaaagactatgtcgcgtcccaaaagctgactgaagtggactgggctgacgtcgtcaacaagccgaacgtcgctatccaagacactacgccgtggttcgccaatctggagctgtccgatgctcggcctttcatcgatttccacttcaacagcaatcgcgccaaagattttgactatcggctgatatctgaagcagacggatcgctggctttctattcgcggcaggggtctgctgggcctacccaggacatcctgttcaaccgaaattccgtgactttcttccagccgcgactcgatgtggcgaaaaacctcgcgtacatcgcgaactctggccccctttggcagaacaccaccgccgatcagcccggttggaaattcacctttgcacaaggcgtggacgcgaacaacaacgcggtgatcgcagtcaataccaccaatccggacggttcctatcgttcacaggtcatgcgatgggactgggcgtccacgaacgtcatattcaacaaccgtccgctcttcgccggtcaatacaccccttgggattctgggaacttcgatccgaacactaagcttacgttggacgcattcaacgatagccaatacaccaggatggtaaacagcgccgcgaaggacgtagggatagccgccatgacaggttatggcgacgcggctatgtcgttcttcaactataaggcttcgacgccgaccgggaatcgtgctgctgtaatttcgtttgttcgtaacggggcacgaggcgttctgttcggcctggacactgacaacaagctgaaatggggcggctattctctaggtgccgtcgcgttcgagattgccgactccaacaacctcatgagcctgtggtcatcccacgctgccgcgccgaactggaacgggcagaccatctggaggtcgggaaacttcaacccagacaccaaggcgactttggcagctcgcaatacgacgtcatcccctacaatattcagttatggggcgtccagaatcgcatcaaccggacaggtcggtgcgttggttgtggaaaacaacagcgtcaccaataccgcagccgccatcacgttccattcgccgcagaaatatcaggtcaacttcggcctggatgcggacaacgtggtaaagatcggtggcggcacaatgggcgacgtagcatatcccatcatccactccggcaactacaacaactacatcaaccaggcgctggttcaggtaggtcttggcggcgtcggttcctacgcgatccttgccgtattggacagatccgcgccggcagcgtccattgcccccggaacgatcatggacagttccacgctgttctattcgtcctgcgattcgacctatcgcagcagcgccagtccgacgggcacctggcgctgcatggggtatgtgtataaccgagactccaccaacggcgactcggcatccctattccagcgggtaacgtaacatgaaatggacgcggatcagaaacccacgttggctggacgcggtaaacatccacgccatggttactttcgaggggatcggggaagttcctttcacagccaatccgcacgacgtggaggcccacggaagggccatccacgctgcgatcctatccggggcgcacggccctatcgccccagtagactcgacgcgggagcaggccttgcaggacgctatacgagacagggaaaagcgggctatccttcgcgatacccgatggcccatagatcgtcacgacgagcagaggcggctgggtatcgaaaccacggacgggcctgggctgatagcagcccttgttcactggaggcagcagattcgcgattggaatagcggggatcggccgcgacttcccatggctctgaaaacaatgttcaaaaatcaggagtattgatgaaaatcacgaaggatgttctgatcaccggaaccgggtgtaccacggatcgggcgatcaagtggctggatgatgtacaggcggccatggacaagttccacatcgagtcaccgcgagccatcgcggcctacctcgccaacatcggcgtcgagtccggcggactggtaagtctggtggagaatctcaactacagcgcccaagggttggccaacacctggccgcgccggtacgcagtagacccgcgagtccgcccgtatgtcccgaatgctctggcgaaccgcctggcccgtaacccggttgccatcgccaacaacgtgtacgcggatcgtatgggtaatggctgtgagcaggatggtgacggttggaagtatcgcgggcgcggcctgatccagctgaccgggaagtcgaactattcactgttcgccgaagactccggcatggacgttctggagaagccggagcttctggaaactccggccggcgcgtcgatgtcttcggcctggttcttctggcgcaatcgctgcatccccatggcagagtccaacaacttctccatggtcgttaaaaccatcaacggcgccgcgccgaacgatgcgaaccatggccagctccggatcaaccgttatatgaagaccatcgccgcgatcaatcaaggctcctgatattcgcccaaaagaaaaggccgcttattcagcggcctttttgctttccggctttgcctcttcaacaatcttgacttcaaccggcgcggcggactcttcctgagtgaccgaatccacatagttccctagtgaactcagaacgccgattaacagcgctcttaccaccttgtccttgactgtctcgcctatgatcttggtcagaacggatattaactcttcccggagtctgtggctgattcttggccgaaagcgcttgcgatgctctttgcgtttcatgtttagtcctctgtctgcggtcttctcctcaccccgataatggcttggggatgcgttgtgttaatcggaagggtcgggcgctattataacccgtcgaaaatgctcgcgcttaactgtttaacgatacgcaccgcgatactaaatcgccttctttctggccaaggaactctggcggcctggtccggtctaaggcctaatttgtcgacattaaaacgagaaaacccggatcgcctgtaggacaaggcgtccgggtttatttcgatctagtgtacgctagaatcagtggcttccgccccaaccgtccagccagcaatcgaagacggcgtgcctcggcttgtccttggcgccatgggagaagtgcttgaaccggatgacctggcccttgagatactccctgtcattccagcggcgctgtttctcgtcgtgggtcaggctggaggccgacacgttgaaagtgactccaggccacagacgttcgttgcggcagactaacgcaccgaccattccggacggcgacaggttttccgcatggctggagcgagccgtgcgacccagttcattggtgaaagattcattattgttgtgcatcagctcttctacgtcgatgatctcagcttcgtcgtagtcgtagcgcttgactttcacacagtacccttccttggccgtcgagcgaccgaacttatacaggccgtctgcacgcttgcccatggaaccttcgaatcccagctcggtgtggcggcgctcgacttcggtgaactgctcgatggaagttaccagctcctgctcgaccaggtgaattctctcacagccgatgcagttgcgcaggaagttcacgcgctcggccgccctggacaggcgctcttcggtcggtgcgcgatgatcggtgaaatcgtcgaacacatggaaagaccagtccggctcaccgctgtggcggcgaagatcgccagacgacttctggaaaactttcgggtcgctgatgtcgccgcacaccagctcgccgtccaagccgttgaacaatttatcactgagatattcatagatcgactggttagtctgccgctttaggcttcgagtcaaagcctccccttcgaatgtgaaacagcgaaatccatcgatcttcggtgagaaatacatcggcatctggctttccaacagcttcgggtcaaaattcgatgcgagcatgggtttcatacagttctccagaaaagaagcccggcgaaccgggctaaatggcggtaagccggctcagatggtttcgttggcgtggttcagttcggccatgatcgacgcatagcgctcgtccgactccttgatgaacacgccgtcgtacatgacgcctttgcgatccttgatggtgtcgtaggccgcagcgtagcaggcgagcatggtagtgtcgtactcttccgtcacatcgaacagagtcatgacggccaagaccaggctcttgatggctaatccatgatttccgcgtgccagcgcgccggccagatgtccgaggtgctgcaaatagtcgcagtaggtgggatgaactttgacagtctcgctgaagaccgatagatgatcgaacagattttcaccgagttgcgcggccatgatcgtggcaaccaccattacgtcgccgatgccgtctttcacctcgactggtttgttataaacccaggcttcgcaaacttctgcgaactcttcgaccaacttcaggaattgatccttggccgaagagcctttgatcaggttccggtcggaaccccatttaacaaccaggtcgtgaagttcgcgactcatgatttgttcgatattcattctttcgattccttttggatttgggatttgactgcgttgattatggacgccgtgctctggcgcgatccatccttggtggtgccgaagtagaaggccattaccgacttcagctcggcgaaccaatagccgatgatggtgccgatggcgaccgaggatgtcgggtccatcagagcctcgcggccgaatgtgaagattgcgatgatgatgagaatggagcctgtcagaagagcgaatgtgatcgccgggcgaacgaaatcgttctgctgcgccgcaagcctcctcgcagaatccctgtctgccgcctctgcggcgaactggctaagctcggcctggagctggttctgctcagactgaaggcgattttgttcggcttgaatcgcaagctcctggagacgaacgcgctcggcgctctggagttcggcgagacgcgctagagcttccggattcgcgtctagagcgctagcgaccgaggctgggtcggccttcgaccccagcgccgtcgcgacgatagcgccaacggcggcgcctgcaggcccacccaggagcgaccccatagccggggcagccgcgccgatcttactacctatgtctttccagtccatttcgactcctcaaaagaaaggcgccattacagcgcctttctccggccggtgatttagaactcttcggcttcggtcgcatcgccgacgccaccggcgtcactgcgaggctgttcctgcttgctgtagtccaccttcacctcgccgccgacgaacgacttgtacaggtctgccgcagccttgaagtgatccgggttcttcaccaggccttccagctcgaactggacgccggaccagctacccttgtcgttcgacatgcctacggtggtcatgcggaccaggttggcgaaagtcggcggggtgcgcaggccctgcggggtctgaacctttttctgggacagcgcggtcatgagcttcttcgaggccttgatctgcgaagacgacagggagatcagagcctggccgaaatcgccagtgtccggatcgatgacgatgacgtaatgaccacgggtgtcggcgaagtagtcagacttcttgtcgctgaccgaaccgtcttcgttcggcgcgtacaggcgtccttcgacttccttcaccttggtcgggtctttcatcatttccttgaagtcttcgacgctgatggcgcccttgaaaccgccctcggcctcgcgaccggcccagcggatgaactcgcggcggtacgcggccggaatgatcagcaggccggtcttgccgtcgtaaaccttgccggtgacggtgttcaggaacatgccggccttcgcgccttcgatgtacttcgggtcatcttcatcgacctggggagacatcttctgcaaaacctggatgaaggggatggcataggactcggcatcggcgccttcgaagcctgcgccgtcatacgatcccaaatccatgaagtcgggaacttcggtagtcgcgacggcgccgccaccggtggcaactgctacggccttggtttcttcggttgcttcggaagtttcggttttcttaccagccatgttaggctccttgtttgtcgaatttcagttatcgctaactgtgggtttataataacggaagttgcaactaagtaaagcaaattacatattaagatttgctctttttcaccttcggtttcgtgattttggcctctttgtattcgtgcacgccgatgaaatctggcagctcttcgcccttctccaaatactcgcgaccgaacgcctggagggtctggtagtggacatcgcggttgatggtggcgtcatagccggcctcaatgatagcctcggccgccttcttcgcatcttccatttcgccgcgaccgaattcggccagaaccttggtcttgatgatgccgtcgttgtcggtttcttccagccacttccagaacttcgatttgttctcttctttgacggaaatgatggccttcggctcgactttgaccgtgcgaccgtcagccagagtagtggtcttttgaccaagctcctccagcagctccggaatggtgttgcgcttgagggttttcagctcctcttccttttcggccagcgccttttgaagatcgaggatttcgacgtccagctgcgaagccttgtccaccaggttcagcagtcgatggccgatgtcggtggcttcgaccgccatttcatccatgacgccaaaatagtcgatttcgcccggtgcgttctctttcaggtattccgggatttcaagctcttgctctttcatgtccgcctccaacttagtgatgttcccttacttgaaccaagtattgagtagatattatgccgcatcttccttgatacggctactgatttacatattaaatttcgtcgcgagtgctaacgtcagcctcaaacacgccatcaacgacataacttgccaggttgcgtttccactccaagctgacctggattttctcgtcgatggaatccagacagatcaggtcgaagtacaaaaccgagttgacggtgccgattcggtgatttcggtcttcggactgcatccgcaactcgttgtcttcgtcggtcgtgtagtaaatggccacgtctgcggcggtgagcgtgatcccgatccctgctgcggccgggttgcccaggaacacctggacgcgcttggcctggaaatcgtcgatcaatttttcccgctcggcctctttggtctcgccgtagtatgtgccaaacgaaatttcttgggcctccagatacgccttgatctggtcgatttcctgaatgcgcatggcccagatgatgatggagcgctccgggtcttcctccagcagaccctccagaagatcagtaaacacggcgaatcgcgggttgtcttcgggcggcaggatcaccggctcgccatagacgttgatatagccggatgcaacttgcttgagcttcgaacgcgctgccgcagcatcgaaagatacgtccagcatgaagtcttcgttcttgagaacgaagtggtagtcttcttccacgcgctggtaaacctttcgctgctccggcgacatttcgaagtatatgcgcttgtacactttgtccggcaggaatgggagtgcttccttcttcgtaacccggaaactgtgcggctcgatcagggaccgaagcttgtccaggttccggaataccgggcgcccacgctcgtctttttcgaccagttgcggcggcatggtttgcttcccttccagcttgcgcatgatagcgatcattcgaggatcgtcactgggaaccaaaacggaaaattcggccacgaacgcccgataggatttcgttccaagaattccatcgcgcaagaattggaactgcatgaacaaatcggtaggcgcccgcgttagaggagttccggaaaggatgcgacgagccacggccttctcacccagctttacgatctttttcgcacgcttggcttgcgggtttttgatcctcgtggactcgtcaacaattgcgcaaaccttgaaagtttcaaggaatcgcaagacttcatcatagccagcctggtgattgatggcgtcaacgttgatggcgaagacgcgaagaactttttcatctgcgaacgtctcggcatacagacgatccaagcgcgccctggcctttttggaagtcggtcggccgcgccaatccacgctcaaagtcttgatcgcgacgtgggtgggaatctcgcgcagaatccagttggtgtggacgcctttgggggcgacgatgagcagcgcgtccactcgcccctgtaggaagaggcgaacggcatcggccaaagtcgtccaggtcttcccggtgccctgctccatcaggtatgcgaaattccgtttgttcagggacgcggccagggcattgaactggtgctgcatagcctcggtcttcatgcccttgacgggatatgttttggctttcatttgttctccaaatcggcgaggaactgaatgatgttgtccagtccttctgcatagctcgcaacttccaccaaatcgcggctgttaagctcgaacaaatcgagcataggattcagcagcagccaatcggttccgatcttggcaaggacaaagccccggccgccccagccgatccgctcccgaaggaatgggatttgcccaggctcgaaacatctggccattgggcaggtggaggcgcgtttcggccactcctccaaagccttgaactcgatccagaactggacgcctcgacgattcaggcaaatcgaatcggacataccagaccgccgcgtctccagaaaatcgatcaggattcggccgagcgagcgctgcttaaacgcattcgccgctttcgtctcgcgatcattcatcgccttcgccctctttggaaactttctctgcttgcgcggccagctttgttttttcgcgttcggtcaatatccgcttgacggccttcacgatgaacatatcgattccgctgagcttccagcctttgatgaggaaccaagagcctgtcggcgttccttcagcaatctgctttccgtattgcagatatttttcaggcctaattctgaaacgtatcggctgatcaaccgagtcgtcaacacacatgatgtcgaggaactgcgactggcccttgtacaccgggtttttcccttgatctgccctcttcttctggcgaatcggttcgttctcatcagacagaacttttttcaccatcttgacaatgaccaggccatcgtctccatcgcggatatcccgaatgttctggatggggtttccggaagttactccaaccaactccggattgtcataagcatgaccccagagcgtgtgagcttcgttcaaatctgcgaattgaacttcagaattcgacagactcgcggcgactttctcccaatcctgaagcgtcttcaggtgggttccggccagctctttatattgagctttcagctccctaagatcgacctttaactccttcagatcggccttcaacagtttttccagttctttgtcttggctgattttcgccgaaagaatctgggcttccagcgctgctacatcagcagccttgtcctcaacatcctgtgccgatatcgggcaattggccagggcgatcctcgcggccttgacgtcatcacgaaggcgcaggaacttctctgccttcgccgggccgaagcctttggcgttcatgatgccgccgatcaggcgtccgtccgccactacccagttaagttcggaatgctccgggtccagggccgtatattctacgccttccttggccaattcgcgaaggatggacacagtttgctggtcgtctttcgccgcccgaagacacgcggccgcgtattccaggcgatgataccgcttcatgtagcaggtccagtacgtcaccacggcgtagctgaccgagtgggagcggttgaatccccaggcgccaaatgtcaccatctcctgccatacacggtgagcatcgtccggggcgacgcctatggtcttggcgccctcgatgaacaattcccggcgcttgttgaagaactcttcgccctttcgcgcagacatggctttccggattgccgacgtttgttcccagtcgaactggccgatgtccttgacgatggacatgatctgttcctgatataggaagacgccgtacgtccctgacagatattgctcgacctgcggaatggtataggtcacaggctcgcgaccggccacgcgctcgatgtacttggtggccatgccagaagacaacggacccggacgggcgagcgccgtgatgtggtcgatgttttcgaacgcggtgatattgatcgcgttcgctaccgagcgaacggcctgcccttcgaactggaagatgccggacattttgtcttcattgaggacgtccagaaccgccttgtcgttcaaaggcaagtcgtacaactcttgcgcggtcacgcagttcgcgtcctggatgactcccagagttcgaaggccgagcgcatcaattttgagaagattcagatattccgaatcgggcttgtcgagctgcgcgacgccttcagaagttaccgtacagaagttgatgacttcatcgttgcagaccaggatgcctgccgcgtggacgccagagtgggatgggtgaatttcgaggtcgcccatgcaggcggacgcgatctcatacttttcgcggaagtcgcggccgggctgagttttttcgaaagtatcctccaatccttttccatatcgttcgtccgccgatgtatattcgatgatcgagtttttgatgttgtcggtatcgtggaaggggatgccgaagcgctttccgacgtgagcgataaccgatgcggccttgagcgtgttaatgttacccaacttcaccacgttccaagtgccatacttctgctggagatattcgaacactagatagcgatgggtatcggcgaagtcgatatctatatcgggaagatcggaccgggaaatgtcgataaagcgctggaagagaaggcgatgagggagcgggtcaacctcggtaatgccaaggagatagcagaccaaagagccggccgaagagccgcgagctgggccgaccagcatatgcttcttggcgaacgcgaccagatctgccacgaccaggaagtagctgtcgaaatctttcagctgaatctgcttgatctcttcttggaatcgatcctcatactcctgggtccattccttgatgtggccgcgactgagacggtaggcttgcccctcgcgagccagcgcgacgatatccccatccaggtggatcataggcgccttcgccagtttcacatccgccaattgttcgactaccgcacgagtattggcggcggcggcatcgaactcttcgcgagacatgatgtggcgtaaacggctccacaactcctcttcggtggcgatgtggcgaaggccgaccgattcccgcaccttccaggccgacgcgaaatcagcatggtcgatggacggcatgtcgttgtaagaggtaattaccaccggctttccgaatgccctggccgtctccatagcgccgtgcgcggcgaccatcgacgcgggattgatgtcaatgtagtcgattccggccagatccagatgggcataggcctcgccagcgaatttgatgacgccgtcagcttcctggaattcttgcggagtcaatccttgattctggaccgacttggaagtcaagcggtagaacttcttggtgtccttggcgagcacccaggctttgagcttcagctctttctcgccatcgtcggcgcatttgatcgggatttccatgccgaatccgcgaggcagttctgccttggcagcggcttgttcccaacggacgtggccccatgttccatcatcgacgatggcgacgaatggggattcgatctctttggcgcgctcgatgatctccgggaatcgaccatatgcggcgccgtaggagtaaccagagcgaacgcggagctgagggaaagacatcatgcggcctccattgcttgatacgcccgatacactcccatgcgcttgcagacttcgtggagcagccgcacgtcgtcgagcgcccggtgtttctgtacatatgggccgcagtagtgctcataaagatgttgcagccgcatgcggtggccgaacaacggcgccgactcttccacagtacagatatcgagcgatgggaaattgacttcgtccaggccgaacttgccgcgagccagatcgcaggtcagcatgaacttatcgaatggcaggttgtgggcaatattcgcgtcggctctggaaaagaagtcgcgaactttctggcgctgatcgaggaaagatgggtgcttgatcaggtcttcgttcttcaacccggtgatcttggtgatgatttcctcgataacgattccaggattgcagatgaactctacttcatccaaaatcttttcgccatcagttatcacgccggcgaattcgatgattctcggctgctttctcagactcaccctttggtggaacgggagtcctgtggtctcagtatcccatacagcgaatatcatgtttgttccctcttatgtcgaaaggccggctgctttcgcgaccggcctgaagagtataccgcgacggctgaagatttacgccttctgtccgtctttcggcgtgatgcggccggagcgcatggtggcgtgaacaaacgccgaatagttgatcgagtccaaggccgaatcggcatccttgaacccgctattcgccaggcgagtgagtttacccaccatgtgcatcacgaacagggcgagtcgatgatcatcggcggtcttcgccaccaggccgttcgggaagaggatttccatgatctttccgtacatcagatcattgcgaccataggtgctctggcgggcgcggaagacttctgctgcggcgtacagattgttgagaacatcttccgcgaaatcatctggatgggaatcatcttcgcccggccagacggattccatggcgaacggcgcggcgtcttcggtcgggtcttcggactgagccgtttcagcgagcggagacggggctttcgcaaacgcctcgtcgagggtaggggcggagttcggggcggccgggaacggctcgcctgccatgtcgttgggcgcgctatcggggtcgctatcggccgcgacggcgaagaacggcgcatcgcagccttccaggttcaggatgtaggagtcgatccccaggctattgtaggcatcgatgatgtcctggcgatcatcgaacgccgcgacgatcttggtgacgccttcgattttcttcaggatgtcgagcgcgactgcccgcttgaactgaggtgccggctcggtgttaccatacggccgcatgatgagttcatactcgcgatgttcggcgatgccgagttcgcggtggagcttggccctggtctggaaaaagtggttgtcggttcggccggtgacgaagaaaatcatgaggtcggcgtcgatggcattcctgatgcgacctacagcgtgcgggttgagagtgtccttgtcgagacgagaatgatactcgtcccattgccgttccaaggcgaagctcttgcggtggctatcgtcgaatacgcagccgtccaggtcgaagatgatgatgccattctttggtttgcgttccatattcagatttccttactggttgctttctgggtgacggttttatcgatgaacgtcccatcagaagtgaggcggaaaacttcgccattctggatgaaatcgaacgattgcacgttcattgtgatgcgaatggattcgctgccgttggtcacttcgacttgtgcgatgtcgccaactttctcgacaatgatcttcatgttacatggacttcccattgacggccacagggttggcctcttgtttttccgatccccagaaatcgcggcgcagttcttcctgctcggccgagcgatccatccaggggcgatagaacttgcactggtagataggttccaacggaacatcaatcacaggaatctgacctggctttgtctccagagcggccatgaaccggtcataggatttctgctggatttcctcttcattcatcaccttcgacccatagcgcgggaaggcgcaggagccggtggcgacgcagtgcggctggagcaggctgtcgaacataggatagacttccagaaccagccggcgcatttcgcggaatacttcctgatattcaccctgggtccgaacgcacaggcgaactttcgccatgtcgctcagagtgcgcagattgaacttggccgcgatcttcgtttccatgttggaagggatgatggcacgagcgtcctggagcgacgcgccggcctccagaagcttctggtagctggtttgcgcgtcggcaatggcgtcatgccacagacggttcagctcttcgcggacatggtaggtcgggtcaggctcgccatttaccgtagccggttcgtcgaattcccagcggaaggcttccggctgaacgacggcgctgatttccagggcgcgactggtttcctgctggtaagcaccggtccgcgtccggacgagttggtgggtaaaattcttgcttacgccctcgatctggaaaatgaagtccacgaattcgaacggcgagcgaatggtgtccagcatgtacttccagtggtcgagcttttcggcttcggtcatggtcgccgggtcttggccgcgcatgcgggtggatttcgtccccaggaggagttcccaggcgttctgggtgtaactgatcagagaaatcttcatcagaaatcttccggaattggcgtgaaggtgaatttttctgtgagagcaagtgccaggccttgggcttgctccttacgaagtccatactgctccatctcttccttaagcagttcgcaggcctccagacgagactcatactcttcagcctcatgaactgacgagaagacggttccatcagaggttctgtatacgagttcaatagccatgatcgcctcagtagcagcggatgatttcggcgcggatatctcgacggtcgaggtagtgctcacgaatcttatcgcgggcgcgctcggcctcttctcgactgccgaacgacaggttgaacgaagtgaaaggcttatcgtccagttcagcgccggtttgatacaggatgcctaccagaacgaaagacggcgcggtcttcggctgctggtcggcttgcatttcgagttcgaggaaggacataggaacctcttcaggatggtctggtgcgtacattaatagcgctcctgctgagcagctacggtttccggctcgtagatgagcatgtcaacgatttccgggcactggcctttcacccagtcgatggccgcgaccagtgtggtggaagcggagaaagagaaagtgcggtaagactcatggatgtacggagaccccatagaatcgcgctcggtggtgcgcgaaatgactgctttgatattaatgatccggcccatcttcggcctccactttagcgattatatctgacaggcttaacttctcgccattcaggaaataactggcgcgaaacttcctgtcgccctctggcccgacgattcgggccgttatggtgagactcccgccgccaagggcatcggtgtcccggaagaaagctagcagcgcccgcttgagcgctgcttcgcgaggatcgacggccattaacctaccacgttccagccgtgctgagcgcaccacacggcaccagcccctgcaggaaggctattcagaaggaacacaggagtcaggcggccgtcctcggtcatatggatgaagtagcgggcgccttcaccgagccactcggccttggcgatagcgcgttcgagattggccttggtggcgtaggttttggtgtggttcttgtcggtggagaaggttacttcgcgggccatttgtcgattccttttggttgaaggggttcgcgtttcgatgagggaatattacgcccacctgatccagaagtaaagcacttttgtaaattacttcacgaacattttcttggccttctgataagacgaagaagtcatcaggcgctcgatgacgtccatgtccgaaaccagatcatccagaaggacgttgcgccaggtagcgaaccggccgagcgagaagatgccagcctcatgggtgagattccagatcatggattcgcgctcgtcgcgaccgagcggaatgattttgcctttggtctggatggtcggctcgccatcttcgatgagctgtttccttctgatgccgaaggccgcgcaaacgtaatccatatcccagtcgctgtcccattcgatggtttcgatctcaccatcagcgttctccaaaacgccattcgcgacggattccacgatcagagtatcgccggtgatggacgcgcgaaatgtcccgaagtcgggactggggaaataaacggtctggaagacgtcacaagggatggaaagcttgtatcgactcacgatgatggatgttcctttaccgaatgacgggtcgatacccaggtccatccccgccgcagccaggttggcgcggaacggcgcggtgcttatgacattcacatggtcatcttgccggcgaaggtactggaagaaagaggcgtcgaaaggacgactccaagtgatgcggttcgccagcttggcgacaagctgctcatagtagtctgccggcgcgatccatcgtttttcagtcgccagattccagatggaccgatccgacaggccgcctgtcactttccttgagtacatgttgcagtagtcgatgcgcggctgggaaatcagctcgtcgtccatgtagatggctttgtgtacagttacttcgcggaacgggatgccggtgagttggccaattactggcgagcggaaccgcaagagtgcggtgtggcgttccttattctcaggcgtcgccgcgtcgatgatttgggcttgaggaaagcgatgcgcggcgatcagtccagcgagtccggcacctacgatgattactttctgatcaggaatcatgatttgttccttctgaatgtacaaaacttgagaggataaaaaagggacccattttcatgagtcccttgaagagctagacgattcaggctcagaggagcggcggcttactcctcctcaccttcggaaccatcggcgccctgatcttcaccgccgtgctcctggccttcgtcatcggccttctcgtcatcgccctgggcagcttcgtcttccttcgaagcgatggcaaccagatctacccagcccatgatttccagcttgctcaggtagctgcggaccgaggtgccatagagaagattggccaccttatcgccgaaggattcgatttcgaccggctcaccaacggtgcagtgctcgttgatgtatgcgaacaccttgccgcgagtcgagaaggcctgcggagtgccatggccgtcgccggtcgggatgaagtgagtggcgcgggggcgacgcgagccgttggacttcaggtcttcgcggcgggcttcggccttcttgcggcgctcttcctgctcttccttgcggcgctgcttctcggcttcgcgctcagccttcttctgctcggccaggcgcttgcgctcttcttcgcgagctactttctgagcttcctgggcggccttcttctcttcggcctttttggcgcgctcggcttccttctcggccttcttctgctcgcgctcggcttccttcgccttcgccttctcggcctgctcggcttccttcgccttggccttttcagcacgctcggcctccttggcggcggccttttccttcgccttctcggcgcgctcggcttccttcttctcgcgctcggccttgcgcttctcttcgcgctcggctttcttctgttcggcttccttggcattggcctcggccttctcggcgcgctcgcgctctttacgttgacgctcggcggccttctcggccttgcgcagggcggctgcttgttccttggtcagctcttcgccttgggtctgttcgttctggtccatgttcttactccgggaatgtttgaaaggatggcttattggcctgtgagaggattatctctaaactaattgaagaagggaataccttcgcctgaacttctctaaatatttttctttcgggaaagtccagactccagggaacttatttatgttagcgaagtttttaactcttacgcaaaaacaacaagtattcaattgcgcgagttatgccagtatacatcaactggctgtaaggaattgaaggcaagttttcttccaacattgcgacccgcttccattccgatccctgcgacttgtggaacgtcatcgcccagccgaagtcgaatccgccaatagccttctgcgcctccagccgcacgtcttcctcggccgaaaaactcagaggattgaacttcacccagcgttcatagttcgtgccgataatgcgaactttggcgaacaacatttcatcaggctcgtcgtcatcctcttgcccttcaggaactggcttgaagtccagcagaatggcttgttcgccattcatgattccatattcgtgctggttcccagtgcaaaccagcttctcgccgattcccggctgcgcacctttgtagccgaggattcgccgagcgcgtgcgttcaagcggcggcgagtattgttgtaagcgcaaagaatcacaccatcgttgtccaggaacgtccgcatttcatcatccgacatatcgaagccggcccggaccaatatgtcatcatactcgcggcatggcaagcgcttgccctggcgaacaaacatcgacgcccgaacgatattgccggcgttgcgctcgatttcggtcatgatggtatcacaactgttctcgtggaagatctggacaccgcgcacaggaggaacttggccaaagtcaccaatctccagaaccggaattcggtgcgacagcaagcgctcttcatcccactcgccgatcatggacgactcgtcgagcacgaccaacttcggcttctcgtcgagcgagtctttgttggcaaacatgatttcgccgtcttcatcttcaccaatcggccgatagatgaagctgtggagggtccgggcattggtgcaacccttctcgcgaagccgcgctgctgctttcccggttggcgcgacgaagactgtccagtccatcgagcagcaaagttcggcgattatcttcgcgatggaagtcttaccagttccggcgaaaccagcgagtcgatagacctggcggcggtgcgctcgatcacaccaaccgcgataccagtccacaacggaattgatcgcgtcgatctgctgactgtttggtcgaaagccgaatcgctcttcgatctgatcgacggtgaagttagatgctgacatatttgcgttctccaacgctaggtttaatggaatcgaggctcagtttaagcacgccgtccacagaccagccagtgctacgacgatacttgcggccttgcggatcgacatagaagttcttcgtgcgccgcagcagaacataatgccaagcagctccaagcgcgtggacccttcctttatacgggaaagccttcgcctgctctgcggcctctttggccccagggagccagcggacggtcgaaaggaccaggaccgcccccttaatagcctgggaagcggcgcggccgtcctttgggctatagcgatgtctatcgaagtctacccagtggtggttgccgcgccggagcttgaccgttcgggatcgcccctcgaacaccacagtgccttcgtgagttaaaatatgttccgccatcgaatgttcctttataacgtacagttatgctttacctctgcgcaggaagagtatactatcagctgactcgccaaagcgagcgaatttaatccaactttacttcggcaggaaagtggccgatactagcgccgccgcctgtactgccctccaaaacagaggatacattaaatgcaagaatgcaagatttcccgcgaccaactcccggtcggtaatccgaatcccaatgtcgacaagacccgcgacccgaacctgaagcccggcttccttcgccgaagccgcgagctggacccggcgctggccgttcgcattcgtcgcgagctgatccacgccgaagcatccgacttggccaaggccggatgggtcaattcacagtccagcctttatggatcgaaagccttcccgcgccattccgtcgttcgcgttaccggagttccggaagatggggctttcatcggcatgctgatcggcttcatcgagcatcgcgagcatggcgaatgggcggtcatggaagccggaacgaaagaaggcggcgcagtcatcatcccggtcaatcacatcatgcgagcgtcattcgccgaagccgaagagttcgccgaaaagtgggagcggaacttgggctggcgcctcctgcgacagctccgcgagtgcggcgccctggccgggactgaagacgagttcctgcggcggatcatcaatcgatacgttcgtgatcgcacgatcctcgatcaccacaaagtcggcgcggacaaaacctatactgatgcagtactcaaaagcatcggcgaaacatggccgaagattccttcggggaaattcgtcggacaccgagtcgcgcagctcctgatcggccacaagctaggtcgagcggggaccatcctgaatgacctggtggacttcctggagaagttcgcggccgggcgcgataaagttctcaacatcaccatctgtaattgaggtgaatggcatgtataataaaccgactttgaatcaccaccatcaaaccgcattgttatatctgtataacaatcccgatcagccggccttcacaggccccaacaatcaggcgctaaatgaacttcggcagatggggtatgtaaaggcgaaaaaattcgaaaactgggcaggcaccggccatcttaggatggaatggacgctcaccaaggccgggattgagcgcgtcgaagtcgggtttctggggaagtgcgccgcttgcaagggaatcggtcagacgttgcttcgggggaagtgtactgtttgcaatggccgcggccaggggtggatcagcgaatggtcgcagaagccaatcgaagataatcctcaaattgcccctaagttcgaaaagaccgatgcgaataggcttgcagacgccattgaagaaatcggccggctggaaaaggcactggccgaatccgaaaagcgcgggagcgagctggccgcgagctattgtgacggcgtagtcggcgatgaatacggccatccttattgtcgttataaagtggaacgcgacgccgccttggccagggtcgcggagctggaagggaagttgacggactgggtgcacgaagggttccggctcaacgaggcgctagcggtcgccaaggctcaacccagcgtgccggaaatatctggcatcggtcgcgatgccgaacatcccagagctgtagtgctgtatctgcgtaacgaacccagcgatgaagatatgcgagcaattcagaactttttgcgcgccatggccgcccccgctcagcacagcgtgccgaaagcatggctcgacgttcaggcagagcgccgccggcaggtcgaggcccaggcgctaaggcaggaagtcgcagcactgcgcgcaagggcggatgttgtgccggaggtgttcgggcttgagcggtaccgcgtagaaaaaactgggaagggtttctggccatactgcgtgcgtgcgggggatggaacgcgtgaactgttcgtcggccacttgaagcagtgtcagcgggtagcgaccgaattggctacggcgtttgaagatgggaagtttatcgccgcgcccggcagctcggctcagcacagcgtgccggaggggtggaagctcgtaccgatggacccgacatcgcagatgacctatgtcggtcagtccctgcgttatgacgcggtaaacagcatcggcgagatttaccggcaaatgctcgccgtagctccctcacccatcgatccggccgcgcatcctcagccgtgccagcaaccacaggcccatcctgcccgctgcgggtgcgagcggtaagtgccaagtaaggaattcatgtaatggaacagaagaaaccttcaccagtagatggagtcatcatgaccagcctcgacgttctccggaaagcacagcccgaagcccaggacgagtatgccgtgtccatgttcgcaacggcgatccgccagaaaatgcagcgctcccgcgataaaggccgaggcggctggatcgactgcgacgaagatattctgatcaacggattcgccgaacatgcgctgaagggaaatgagaacaacctcttggacctggcgacgttcctgatgttcatgtgggtgcgcggcatcgacgatgcgaagattcccccggcgctcgaaaaggcgcggcagcacaagatcatggaagcatggagtcgggtccacgaagatggactaaactccgccagaaaggcgagtgctgcgcgacagttcgtggaagtgcctcgacgcaaggggcgcccggagcgacttgcatgaagcctcacgaaataagactggcacaggccgaagagttcctgcgcgaactcggccgagggattccggacgacgaacgggtaatggtcggctacgctgaagaggccacagtccaaaccgacgagaacggccgcaagctcaacgccggctggtggcctgtgccctggaaggaagggaaatacataaactcccgatccaacgcctacgcttgcatctcgtcatccatcaagacgcccaacccgaagaccggccagatgcgatactggcgcggcgaagcctctttcggccacggcctggcgttgatggtcgatgacatcggctcaggcaaagggtccaagggcgacttcgaccgcgacgagttccgcgagcgactagagccgaccgcgattgtagagacttcgccgaacaactaccagttctggtatttcttcaaagagccgatgtcccacatgctccagttcaaggcgctgctctattcgttcgtggaccaggtgctaaagaaaggcggcgacaacaccgtcaaggacgtcagccgttacggccggatgccattcggcttcaacaacaagcgcgggaaagacggcaacctcaagtatgccgacgaaaacggcaagcccgaattggtgcgcctgtaccacgcagactattccaagcgatactcgccagaggaaatcgcgcaggccttcggcgtccgcatcatcatgccacagatgaagaaggtggagataaaccgcgacgattgggtttatgaccaggtttggctaaagtatgccgagcacatctgcacgaaatacaagatgggcgaggcagcgggcggccaagtccaacagaatatgtccggtaaatatcgcatccgctgtccatggggagacgagcatacaaatggcgatccattcggcgcctactttcgcgggccgatccctggcgctgagcacgaatatgtgttcggctgcggccacgatacttgccgcaaagagcatcgacggacgtgggctgccttcacggatgaagtagtgctgccatatatagtcgaacaattggaaagaatcaaccgccgtcatatcggtgaggagtagacaatatgcaaaacgatcctggagtcctgattaccgccatcggcttgctgttcctcggccttatcatcttcttcgaaggcctaaaggggtggaaaatacaagtcgcaaacttcctcgcgtcgcttctgtgcttcttcttcggtctttccgctttgacgttctggttcgtcgttgcgtttgacgtattttaatcgacgaacggtacagaaattttcggatggggacggaacttattagctatgccggtttaggtaggagataatagccgtccctttcgcctcaatatgtagaggcaatgttgaatccgatcatgtaaagcagaaggcggcaaacctaacatgattatcgacgaagataacattcttgatgacgaatcagggttcagtgagttcgatctcacgcaaatagaagatgctggaatggaccctttgatgaccgccgcaagtaaggcggccgatgatgcgattgcgaggaacgagacgcaccgcgcacaaaaggcggcgaggtatgccgaggcttatgcggaaccagatttgaagaagcgagcgcgattgttgatgctcgaccaggcgttcgatcttccggtcagccgggtggtgaaagggccgttcgatgacttcatcacgaaatacagctcgacgtcagacagcaactacctcgcggtctatgatacgttgttctgtaagggcgacggaaccgtcccacacccgcacttcgacgagtttcgcggccggctggtggaccatcgcggcgtggcgttcaacaacaagaccctcgatccgattgacctgatgggcgccctcgcggctgcggccttggacgatccatcgatcaagaagacgattgagacttgctgcgtgtgggcgcgtcgatatcgccgcaactctttgatcgagacgttcgagaagaagataccggagtgggatggcgaagcgcggatcgacactctgctgatcgacttgttcaaaccgttcgacaccgagcttaaccggatggtgagcaagtatttctggctgagcttgtactgccgcatcaactaccccggaatctcggcgccgatctcattggcattgattggtgggcaggatgcggggaaatcatatttcggcttgctgatctgtaaggaactgtccggtgggcgcgatctggctccagttcagctcgacctgagccgacacgaccagacgccgttcctgcgcaacatcaccggcaactcggttattgcgaacgtcggcgaaatgtccggcttcaaaaagggcgacatggaacgcatcaaagaattcctggtgcgatcttcggatacattcgatcagaagtttgagcctggcgaaacgatcaagcgacaatggatcaccatcatggacggcaacggctacgatggactccagcgggacgactccggcaaccgacgtttctatccgatgttcgtatcacaactgcccgatgaagatggaaaaccgaactgggtcaagccgggagacggcaatgaaccattcaaggtggacttcaccgacttcggccgcaagttctggcaagccatggccgagtgccgcgcctggatcgaagagcatggcgtcgatggatacctgaatatggtgtcggaagcgaaccgcgaagtgcagaacttctctatttcggaaatggagaatgcgcgtggcgtggttcgtgatgacacgattgatatgtatctgatcaacgtactgatcagttgcgagttcgaagagattaagccgggcaagaattccaagaatcctgggtggagagtcaacacagtcgaaattctgaaatggttcgatattctcgccagaaagaagccgatttctcgccacttaactccgcacctgaaggcattgggattcgtcccgaataagaatggcttgaatggctggtgcctgcctgccgagaaagttgttggcggagaactcaatggagcgctgccgcctttcaacgacgctctcatatacataattagaaggaatgactctgctgtcacggatgaggatgctatggcaaaaattcgggcaatacgggccgagcgcgcaaggatattgggcgaggacttctgatggattgatgtagtgtacagggaatttggacatggattaggccgccttcgggcggtcttttctttggtgcggcgtacattcgatttcggtggtgagcaggattggcaggaatgaatacggtaacttggaccgttttagaggctgtatagtggaaagttgatagattttcggtatcggtcgggcgtgtatggtggttggattttgtgtgaaatgttgagaaattgtgggtttgaggtggattttcggtcgataatcgccgcaagttactggatagcgattctgagcggaaaattgggaagcctactgccgcgtgggttagcggccgaaattcctaatttccggtttttaaaaacaaggttaaaagtattctacagcgaaaatcgattgcacaatcctaatagaaaaaatctatcacggacgttacctatctttaaaattaataaaattaatagtaatttggtaatttggtattctttaggatttgaaagcctcgcggcactaagcttgtacatatcccgtcaagtttccgattccagccagctcgcggcagggtcgccggaaacttccggacttccaatccatgggtcgcggcaacaccacggcggactaagcggcaggcgccaaaactcgacgagcggaatcggaaacttggccacacgacagaatcgctcagctggacatatttctaacattcgatttaacactctgccaaaacactcaccgccaccatcgctcgccaaccgccgactcgatcctcacccaccatcgctcgccaaccgccgactcgatcctcacccaccagcggatcgcccatataacatcctataacaccacctaacactcattcaccatcaaacccacccagacctacaggccaccacaagcagcccatagacgcgatccctggccccatagtacaatcgcgccatactcagtgtcgcggcagagcaccaggggccatccgccaaccaagccaccacgacgactccagaatcgaactccagggacgcagcaccaaatgaccaaattctacagccccgacgatctagtcacgccacaggaattcgcagacccgcatttcgcggcgatcaaccaaaagcgattcgacctgtacatcgacctgcgcgtccaaggttacagctcctggcgggtcttccgggccatctggggcgaggagcatatggacggtcccgcgcaggcccgcatcttcgcgatggagtccaacccgtactatcgcaagcagttcaaggccaagttgaacgcgaccaaaacgtccgatttgtggaatccaaagacggcgctccacgaactcctccaaatggttcgtgaccccaccgtcaaggactccagccgtctgtcggccatcaaggaattgaacgttctggctgaaatcacgttcgttgacgagtctggcaaaaccagggtcggtcgcggattggcagacttctacgcatcggaagccgaggctcagaccgccaccgtcgctgctgcggccgaagccaatggctatgtacaggacggtaaagagggcgatttcccgtccccgacgccggaaccgaccgaggaagaccgcgccaaccccatttagacataaaataacatcgttctaggcctgaatcggaccgatctaaggcgacggtagcgggtaggggcgaaaaacgattctagggctgttataggaagccgaccaataacgatcagaagcgacaaagccccggactctagttcagaatccggggctttctttttgggcttcttattctccagcttcgatgatttcgaagttgtatttgacgccttcgtgctcgaaagtcaatttgccggcctccttcagctgcatgcggaagcggatgtgcttcgaagagggcaggccgaactcgatgaatgctgcgttggtggaccggaactcaccgcgcttccctttgacggtcaccgccacgccatgacgctgggtgcgctttttggagacttccgggtctttccaggagttggcgatggctgcggacaggtctttggcctctttgaccttctctggcgctttcttcgcctcttcgcgcatcttccggatttcttccagcgcttcctcttcggtgacctcttcctccggcttcagattttcttcttcggccttctcttcttccttcttcttggaagtgcgggttttgtaaaccttggccggggcttcctcttcctggaaagcttcttcctcggccggcagagcgttcaggatggcgaggcagcgacgctcggcggtcttgcgatcagagaagcgcttgacagtcgcatcggcgttgtgagcgttgtagaaggcgaccagttctttcatttctgcgttctggatgtcgccgaaggtcttgatggagttggtcattttgcgatcctctgttttggaagatttcgttcgggcttcagtttgtcgccccgttgaaagagattatgcctaggtcgatgctgcgtgtctacatttatttcatcagattgatcacaaagccgacgaacggttgtctgatgtgaaaacaccgcagagcaggctgcggtgtttgttggcgttggggtgatgtcagaaagtcgggactgtgatagggtcgccgggcttgtcgttgtccgatgctggagctggactggacgggatcgcgccggaccgaagcgacagagattccgactgcctgctcacctgcggtggcggtggagccgctggtgcctttggagggattggaggcaggtcatttcgacccttgaccatttgcagaggttctggaagatcgggaagcgcgccagcgatttcgccatacgtccgcgccggatcgtcgccgcccggttctgccggatcgatgcccgtgaatggagtggtcacgcagcgcatgttcggatgggtaggtagatttttcaggactatggaatctgcccagacatacggattcttgtggttgccgggtccgtggctgatgatctcggcaggaatatggccgttcatggtgagccattccgccatcccttgccgagtcagcgggcttaccacgatctgaccagtggactctttggcgatggcgaacagatcaccgaattcgaatccgatgattgtgtagttggacctggactcgccgacgaaagccagagtttcgatgttgtggtggatatcttggtcttcccagatgtacagcatggttcgctcctcaataaggttgcttttggtgttcgaccagagacataccggccggaactttgaagcggacgtattcgatcatcatcgccgttcgacgccgattcgtgcccgactcgtcattgacgaatagttcgcactggtgcggaatgactcgcgtcaccaggcactcacctttcgagccgtagaacttgctgtaggctgcgacgcctcgcgtcatgctcagatggatcgtttcgcagagtcgctgcgcggccgacgcgctggacagatcggtcggactgaccgtcacccagtaatggccactttgttctttatcggacataagctgccctccattgataaagcccctgccgagtagcagaggctggttgttagtcgcgcttcatcaagacgactttatcatatgcgcgatacttcccgcgccagtcttcccagtagtcgccggccgggcaggtcagctccagattgatttcgtcgcgccagcattcgacagaaaggacaattgccttgttcctggctgcggaatccgccctgagcttaatcagaatttcgtcgccagttttcaactcatcaactcttacaacttttgccattgtgttatcctattgggcagcgccgcgagggcggatcgggtcgatgtcatgtaagcagatggtaggatagtccctggccaacttgagcttgaagtccacccagtcagcgccgatgagtgccgagacttcgatgcttactttgctgtgcggcgcagctccagatcgcaggactatggcccgacgccgaacgggatcgttgacgtcaacatgagtgagtatttcgtcgccgacgagcaactcacaggccatcaatattttggccataatacactcctgtatgaatggcgcggccgggaccaatccagccgcgccgatggattaacgtttgtgaaggatggacactgcatccacgtcgaggatgctgatggtacggcgacggcgcggattgctgcgttcatggatgcgaatcagatcagcggatggagcttcgtccaccacccatacgtcttccggtttctgcgtccggagcaggaccgtcacttcagtattctgggcgaggccgttgcagatgaaagtgaacttggacgagggagttctgtacatttcgagattcctttttggacttctggtccggcttctcagccggtgaagagattatgccctgattctcaccgccgagtaaagcatttgtgtaccaattctcccgtcaggtggaaccaaagtgcggtatcgcttatggctacgctaccgcgccatggcccttcttgctcgcacactgcgaaccacaggctgatttccatccttgccaggactcggccgaaagattcgaacctgcgccgactggacaggatgtcgacattcactcgtcgattgacctcataccggcgaccgttgatgacgaagaccagccgcagggtttgtccgtcaagacactcccagtatctggtttcatatcggagccaatagcgcttgccagccgggcctaccatggtcatttaatcgatgctcctggccgcgccacgcggtccggtcggcgggacgggatcgaaccgacccaggatgtagtcgggccggcgcgcttcctgaggacacacggcgagaaggcgccatcctgcgtccagggcagactggagttcgtccgtgcagcagtcttccttgagcagcagacggttgacgttctggagattcggaccaggtatggccgatcctgtgagtgagttccaaccctcgattccactcaccatctccggttggttgatgtagcttacggacataccggccaaccggctcgcggccagctccagacgctccagcatgggtcgcagagcagcttccgggtcaatgtcgtcccagagaaggaccaggctgatgatggtatacggatagtccttgtccagatcccaggctgaagcggtcaggcggcccaggccgatttcattacacataacgggaacgtcgttgctccaggtggacggctcccagttccgctcaccaggattcccgattgttacgccttccaggttccccaggagaacgtggagcttgctgacatattccgcctccaaggctttccgctcttcgtcggtctggttgtggcgatagaaggatggagggctgacttttgcatggtagagtttcataactgttcctcggttttggaaggcttgaacgttagagaatggtgtcgcagtatttctcgaaaagactctggcgcttcttctcgcagatcgagcaggtgatttccaggtcgggcagctcgctgtaagtcttgccgagatacagccagcgcttgcacagactgcgaccgtccgccatgaagaaatggactttgcgagcgttgccgggttgcacccagccgcttggtgccggcttcctgctcataccatcaccatgtcgatttcgctggcgaagaagttaacgccgactccatctgcgtagccggtgtaacgcagccgaatagtaccatcgatgtgggcttcttcgacgccgatgacttccaggatggtttcgtcgcagtgcagcttgacgaacatcttgaagccggagccaatcgacgcgaaggcgatctgtttgtacaggtcttgcttgatcatgctttacgctcctgtttgcggatgtattctgccctggcttcggcttcaaatttcgcccaaagcgcgttgtcgactggaccccagggaccggtctgagttccgtccaccggcgcgaacttgccaccggcgcgacgatacttggacagcgttctcaggctgatgattttctcttcttgggaatcgaattgatcgatcatttgacgtacttcccgaaataggaggtgtggaggatttcgcgacctttggtgatggccttgagcttgatgccgaaattcttgatagcccagtccaggtcgtggtgatagaactcgatgatgttgacgatttgaccggcgctgtagtggatgactcgatgatgttgacgatttgaccggcgctgtagtggatgacgcgaatcttgccgttccagcggaaatcttcgcggctgtttacggcctcgactgcgatggtgtcgtttctgccgatgttccatttggagctagtcatgtcgcaatcctctttttggagtgtttcgcattcgatgaggtaactatacctcagccacctcatcgagtaaagcattttcttcagattatctgaaaccttttgaagacaggaattgccgccagagccagtcgatgtgttcgttgcagtaacgctcgccatcggacgacatagataaggcgccatcattgatgccgaagtgggccgcagcgagacattcgaactcgaactggagcgttcctgggcgagggatatgggacgtggcgtatttctgcacggtcagtgatcctcagaaggtttagcgtttgcgatagccgctactttctgcataccgaggcgatagaaatcggcttctttcctggcttttgtaagctgctccatggcgtcgcacgccgtcttgtgctgggcattggcgttcttgatgctgccttccaggctcttgtccagctcttcccggagcgccttctgcgatgctagctctgcctccaaatcctggattctgagctggagctggcgatttgtctcgccaacctggttttcgcgggcgatggagttctgaaggcattcgtcaaggcgagtattttcgcgcaccagctgatgcttttcgactttcgcctttctgcacgtctctcgcatttctgaaagctcaatcgcatgcagatcgtcatccgggtctttacgctcttccttcgactccatccgcaggtagtactggccggctgcgaaggcgagcactgcctggtcggcatacgctgcggcatcggtcatgtatctggatttgtagcgaggcagaaacttgcactcctctggatcccagaggagactatcggcaataggccagaatttgcggaagccatcaggatcgacttctacattgaccatttgcagctggccggcctccacttcgacttccagaggaacctgaatggcgccggtgatgtactggaagtacactatgctagacataacacaatcctcataagaagtcgcggccgggaccatcccggccgcatcgtaatcactcttcgccttcgtccgcgctcagccactcttcgaaggcgaaatttaccttagactcgacccaatcttgaagctcatcggcgaactcgtcactgtcgatgtccatcggaatgcccagagtctcttcgttccacagttcggcattcagttcgaactggatagccggttcgccatccacattcagcaggatgcggtctgcgacttcatattcgtcgacatcgaagaggaaaccgccgctgatgatgtgctggatgaaagcttcgtcgaagttgctgacgccgatattgatctgcttagtcattttttctggccccttatttggcgagtttgtactgagctttgagggtggtcagcttagctttcagggcgatcatagcctggccgcgcaggccttccatttctgcctcgctgatggcgatcttggcggagcggatttgatcgttgatctgggatttggtcatttctgcgttcctctgttttggagtgtttcgcgttcgatgaagagattatgacgctattcagaatggaagtaaagcagaattgtgaaatgtttctcaaagtggacgaacggtatgccccgtcaggaatatttcctcccatggaaggcatttccgcatccgaatgttgattaggtatcccaaagcgcgcagtggcgaatgtgagtccgcacgtacatagggttgtattgtgcgaagtgctcgacggtcgcatccaaggctctgctattgccgcacccttccgctttgcgagccaggaagaatgcttctatttgctggtttgcgttcatcgtcttaccctccaggtgtttgttcgtttcgatgaagagattatgccgttggtcagaatggaagtaaagtgtattaacaataaaattatgttcaccgacgaacggttgtgctcgaccgtccgttgcggcgtcgatatactcgacctattgctgacaccggattgattaga

SEQ ID NO: 13 - DNA, 65797 bp, Pbunavirus EPa14
  source 1..65797: mol_type = genomic DNA; note = EPa14
tggccgagctggtgtgcgagttccaaccttcgatgccgtccaccatctgtggttggttgatgtagccttcggacctgccagccaaccggctcgcggccagctccaggcgctccagcattggccgcagagcggcttccgggtcaacatcgtcccagagaaggaccaggctgatgatggtgtacggatagtcattgtccagatcccaggctgaagcggtcagacggcccaggccgatttcattacacaccacgggaacgtcgttgctccaggtggacggctcccagttccgctcaccaggattcccgattgttacgccttccaggttccccagtagaacatggagcttgctgacatattccgcctccagcgctttccgctcttcgtcggtctggttgtggcgatagaaggatggagggctgacttttgcatggtagagtttcatggcggttcctcggtttttgaaggcttgaacgttagagaatggtgtcgcagtatttctcgaaagggctctggcgcttcttctcgcagatcgcgcaggtgatttccaggtcgggcagctagctgtaagtcttgccgagatacagccagcgcttgcacagactgcggccgtccgacgtgaagaagtggactttgcgagcattgccgggttgcgccaagccaccttgatcgtttttgcgcttgctcatggcgatatttcctttggatctggaatccatgccgtccgttcgctcacccaaactccgtctacatagatcaggactgacagagcagtcgcgccaaacccgaagcctacatagaatgaaccgggatcgatttccatggtggcgctattggtggcgctattgaaatcgacttcaaagtcgaacatcgaatggccactcataccatcaccatgtcgatttcattgacgaagaagtgcacgtcgacaccatctgcgcggccggtgtaacgcagacgagtcgcgccgtcgattttgacttcttctacgccaatgacttccaagatggtgtcgttgcagtacagcttgacgaacatcttgatgccggagcctatcgccgcgaaggcgatctgcttatacaggtcttgcttgatcatgctttgcgctcccgtttgctggtgtagatggcttcgacttcggcctcaagcttcgtccaaagttcgttgtctaccggaccccatgggccggtctgggtgccgtccaccggcgcgaacttcccaccggcgcgacgatatctggaaagggtctggagttcgatgattcgccgttcgtaggcgtcgaattgagatgtcatttcgcaatcctcttttggacgttcgcgtttcgatgagatgactatatctaagtcacctcatcgagtaaagcacttctgcgaaattatttgatattctgtaaggtcaggaagccggacgatttggtcagtcgatggagccgagactccatccgttgcgggcgaaggccgagcgaccagacagtttgcggcactggatggagctgccatcgtcgaaggtgtaagatacggcccagtccaggcgctcgcgacgtactgccgcattggcgatgtcttccagacgggctttaaggagttgctcggctttagtcatctcacacctctttggtttattcactcgatgaggtgactatacctcagccaactcatcgagtaaagcattttgcgaaattatttgagatttctggaagccaggaactgtcgccagagccagtcgatgtgatcgttgagatagcgctcgccatcggacgacagagccaggcatccatcctttatgccgagcttggagccggcaatccattcgaactcgaactggagcgttcctgggcgagggacatgggacatgatgtacttttgcacggtcagtagtcctcgaaaggattcatgttggcgatggccgcgattttctgcatgccgatgcgatagaattcggcttcttccctggacttggcaagattctccctggcttcgcacgccagcttgtactggttgttggcgttctggatgcttccgtccagactcctgttcagttcttcccgaagagccttctgcgacgctagctcggcctccaaatcctggattctgagatgaagctggcgatttctttccgcaacctcgttttcgcgagcgatggagttctgaaggcattcgtcaagacgagtattttcgcgcaccagcgatgcttttcgactttcgcctttcggcatgtctctcgcatcgctgaaagctcactggcgtgcaaatcagcgtccgggtctttacgctcttccttcgactccatccgcaggtagtattggccggccgcgaaagcaagcatagcctggtcggcatgctttacggcttcacccatgtagtgggtttcgtagcgaggccgaaacttacactcctctgcgtcccatagcagactatcggcaataggccagaatttgcggaagccatcaggatcgacttctacattgaccatttgcagctggccggcctccacttcgacttccagaggaacctgaatggtgccggtgatgtactggaagtacactatgctagacataacacaatcctcataagaagtcgcggccgggaccatcccagccgcatcgtaatcactcttcgccttcgtccgcgctcagccactcttcgaaggcgaaattcaccttcgactcgacccaatcctgcagctcatcggcgaactcgtcactgtcgatgtccatggtgattcccataacttccatgttccatagcgcggcattcagttcgaactgtaccatctgctcgccatcgacttccaacaggatgcggtctgcgacttcatagtcgtctacatcgaacagatggccgcccgccaggaggcgctggacgaaagcttcatcgaggttggtgacttcgatctgtacttgtttggtcatttttcgtatccttacttagcggctctgaattgggctttgaggttggccagttcagctttcagatcgatcatcgcctgaccgcgcaggccttccatttcagcctcgctgattgcgatcttggctgcgcggattttgtcgttgatttgatctttagtcattttcggcttcctttgtttgaagggttttgcgtttcaatgaggagattatgccgaaagtcagaatggaagtaaagcatcttgatgagaaaatttctgcccaccgacgaacggtcgtgctcgaccgtcgatggagggtgtgcataatcgaagtcgcacgacgcgaccggtgatgccccggcgaaccggggcggggtggttaggcggtgcgctcgggcggcgcgttctgcgttacggtcgtgcgccatgcgcgcccatactgcggcccagcgcgctttatcggcagagttcggcttgtacacgtcgtcagggtgcggttccgggccgtaggcgttgcagctttcgtcgtattcgtaggtcatcatcttgccctcaaggggtcatggcccggcgaaccgggcgggtgattacttgcgatatttcttaatcaggtcgtgtgccatggcgatggcatcagaataggtttctccgccggcctccatttccttcacagccttattgcgcagtgcgttcagcttgttgccgttgatggtgcctttttcatccttggcagcttcgcaggagtcgcgcagagttttcagggcttggtaggtggcgttcatcgtcttgttctccgggtttcgcgtttcgatgaggagattatgccgatagtcagaatggaagtaaagtgtctgaatgaagaaatttctgaacaccgacgaacggttgtgctcgaccgtctgctgcggtgtcgatatactcggcctattgcgaacaatggactgattaaatgtacaaactcaatcctgcgctgcgagcggtctggcgaactcgcgcccgttacaaagtcatctatggaggccgggcgtcttcgaagtcgcacgatgctggcggtatagccgtttacctcgctgccaattatagactcaagttcctctgtgctcgccagttccagaaccgcatcagcgaatctgtctacacgttgatcaaggacaagattgagaattctgagtacaacggcgagttcattttcacgaagaactcgatcaagcacaagaggaccggatcagaattcctattctatgggatcgcccgtaacctgtcggaaatcaagtctaccgagggcatcgacattctctggcttgaggaagctcactacctgacccaggaacagtgggaagtcatcgagccgaccattcggaaagagaactcagaaatctggatcatcttcaacccgaacgaagtgacagactttgtgtatcagaacttcgtggtgaagccacccaaagacgccttcgtcaagatgatcaactggaacgaaaatccgtttctcagtgagacgatgctcaaggtcattcacgaagcttatgagcgcgacaaggaccaggccgaacacatctatggaggcattccgaagactggaggcgacaaatccgtcatcaacctcaagttcattctcgcggccatcgacgcccacaagaaactcggctgggagccggccggatcgaagcgcatcggcttcgacgttgcggacgacggcgaggatgcgaacgccactacgctcatgcacggcaacgtcattatggaagttgacgaatgggacggcctggaagatgaactgctcaagtcgtccagccgcgtttacaacctggcgaagatgaaaggcgcctcggtcacttatgactccatcggcgtcggcgctcacgtcggttcgaagttcgccgagttgaacgatgccagccccgacttcaagctgatctatgacccattcaacgcgggcggcgctgtcgataagcctgatgatgtttacatgaagctgccgcacacgacgatcaagaacaaagaccacttcagcaacatcaaggcgcagaagtgggaagaagtcgcgacccgattccggaagacttatgaagcggttgagcatggaaaggtttatccattcgacgaattgatttcgatcaactctgaaacgattcacccggacaaactgaatcaactgtgcatcgaactttcgtcgccgcgcaaagacctggacatgaacggccggttcaaagtcgagtccaagaaggatatgcgcgagaaacgcaagatcaagtcaccgaacatcgctgactcggtgattatgtcggccattctgccgatccggaagcccaaaggcttcttcgacctctaaacatagaaaagcccggatcgctccgggcttcgggtcttactcggtgtggttcctggcgctgagtgtcgacgcaacggcctcgccgactcccagggcttcctggccggccgcgagcgcttcggcttccgactcgacgatgaaatcatcaccttggccatcgcctggcggaacctcgaccagcacggcttcttcgccttcgaaccgcaggtcataggtcttatcgacggacagaccgtaacgagcgttgagcgcgtcccagagctgggactcataggtgcgcaggtcttgcagagctttctggtggctgagcatggccatgtcaacggcccgttgcagggtttcgtccaggacgttgaaccgaatgcgaagagaacgaatccgctcgacgacttccgcatccactacgtgtctttcgatcattacttttcacctttgctgaatgttacgttgtagccgttgtcggccaggtaggtcagggcgccttcgaaggaagttccgacgaggtgcttgagcttcatttcgcgttgcgcggccgaccagaatgccgttccggagaactcggcgcgcccctcggccaagacccttccatcaggcccggcgatccgtacatgcacggaagatagcttgatcggcatcagtgaatccctccactggcttgcgacggcattctttctgcgcgagcggatgcgcagtccgggcacgggcaggcctggcggacgcgctccaactcgtcggcgtccatgacatagagcttcccatcggaagtgtcgtgcgccatggcgatgttcgggaagtcggtggcactcaggccggcgacagcgcggatttcgccccagagcacttcattctcggcattcagacgagcggcgagcgcttcgtgctctttcgctacgcgcgccatgaactcgtccatccggaatgcgaattccgcatcgatggcgcgggccgaggccatagagctgaggtgaatcggttctttcttcatagtgattctcttttggctggggtttgtggtccacccaggcctattcaaagcctggtcgttttgatgaagatgaacaagaagactgcaaacgtcaatagcgttccagccaacataaatactgcaaacgccaatagcgttcctgtgagcattctggcttggctatgcacctcagcatccttcttagtggacattccttgctgcgccgcctcggccgcgaagcgggctttcgcctcgataacttccgggcgcagcgacaggacatattctaaggcctcttcccgcgctttttcggcctcgaccagcctagggtcgcgggccgagacttcgctgtgccctggccttgcgggatgggcctgcagcgatggaggaagttcggcgcccacgactccatagtcggcgcaggcccaagcgatcccgatgaggatcgcgaggatggactggacgattcgcagcatcactttgtcgctaggaaagcccatggttaatcctccaccgaccgaacgatttccatgttgcgaccggcattggtcccggcagtgtaggcgcgccgaccgtcgctgtcgtccagacgcatgagtttggtaacattcgacttcttgtaacccggatcgccgaaatgttcgtggaccgcagcttccttaaccaccaccagagacgttccggccgaagaaaccagctccatacgtttccgggtgatggattggaggcgatagctgatttcctgggtcgcggcgagcttaaattgcgcggcgaccttgacgttgaaccgctcgaaaccttgagccttctgatattcccggcacagacgatctactgcatcgaccagggagttgaacatgttcaccgccagctcaacgtcagatttgtatcctttaaagcggacggcatgacccagcgcttggtagtgcttccgtcgcgggcgctcctggatgccttagccgatgctctgtggttgttgatgccaccggcgaaatccatgatgcagtcattgtaagtcgccacggccactgagaaaaacttcatccagttcgggattgcggaatagtaacgagtcgcaatctgctcgtcgaactcttcacgaatctcgccggtcgcttcgaagccgtggaggtcatacttgtccttcagcttcttcacgcgctcggctgcgatggccgcttcgtgcgggctggaggagtcggctgccatggcggtcagtttgcggatgcggtctttcgccttctcgatggcttccggggtgaattcgttctggtcggtcatggtcggttccttttgtctgaagggtttcgcatttcaatggagctattctgccttcattcagaatggaagtaaagcattttcttccactatttcggcatcgactggaagaaattccagatccaatcacctgctaccagcaagaggatgagggcggcaaagaacaagacagcggccgcgagctgtgcgccaggcttcagcttggggtggctgagttttggctctaccggattctccggagtgctggcgcttggcccggcgtcttctggaccaaagccagcgccgcgctcgcgtgcctggatagatgctatggatttcaaatactcggtctgcttttgcgactcttcgtagatgccggcgacggcgaaccagagtgcgaacactacggccgtgcagacgacccaggctccggtcagaaggatggccagcggaccgatgattaagacggaagccgccaggacgatggcgccgccccagatgatgaagccggccagaccattggtgatgtcgatgcagaatttcttcattttttggttccttcggtcaaggaatggatgggatttggaactcggcgccgccgaggacatcaatgacgatctcccagagcgtcggaaccgaccactgataacggtcgaagtcggtttcaggatcgactcccagggttacataggaagtggcaggccatttgtgaacggcgccttttcgcatgagagtggccacgcgaccgtcaccgagcggattcgtcctgtgaggaacgtaagccgacatcgagtattgctgtccagcgccaatgataaattcttgcctctggcgcagacatacagagcctacaggctcccaaccgcgaccgccgcaggcctggcgagccgaagagtgctcatacccttcatgagtcaattcaccgaggcgcgccgaacggtccacgtaataatttgtattctccatagacccaaccagaaccaaggactcgaaatcgaatcgatgatcgtggatggaagagtgatggaaacaaagccggcgcggcagctccggatgccacacatggaggcgtccggccgggaactggacctggatgaagcccaggccgtgcagcgtgattttgtccttcatcggatcagggacggtatccatggataatcctcagtagaagaagtggatggtaaaggtcatgatggccaagccggtcgcccataggagggcgaaccaggccatggctttgattgtaaggtggatcatccgaagaactttccggcgcagatggggccgatgcccatttcgatggatgcgtgattggtcaactcgcgaccgcagcaggagcattgaccagtcttccgaccgtaggcgactgccgattccattggcttttcgaacatcttcaggatatcgccatactctgtgtcggtgcagtcgcggctcttgatgaacttgccgccagtgatccggccgaggtagatgtcgcccaggacatacagactcccggcgttccgactgttagcgctagcctctttcaccacgacgatgagcggttcctcaccttcgccagccagacgcattttcgggcgcttaatgccagagtctttcgccttctcaaacgccttctcgattcctgaaatgtccagagtcggcgcagcagcctcctgcgcggccactttctcgcgatgtttggcgagattttcgatggctcgtttcgcagcagcgatctgattttcggtcaacgaaccatatctgtaaagagaatccttaaggctctgggcgaaactgaaagagttgtcagtccaccactcgatgatgtccgggtgagcggcttcgaaagcctgaattttaaggccgcgatattgttcagccttctggattttctcgatgcgcttttctgcagccttagcacgactcttggcgcgttgctccgggctgctcttgtactctttatatccaacgccgccgcaggcaaagcaggcgcgaccataagacgaaggaccacggtacaggccggtgcctgcgcatttggggcacttttcgcgatacagcttcggttccttccaggagttcgggcgggcacccatggacacctcttccagggtcttcggcgcttcgttgttgacctctacggtagcgaagtcatcgcccaggtcttcgaagccgttgaacagattctctgctgcgttcatatcgattctcctgtttggaaagttcgtttcgatgggttgactatactccataaatggaaacgcggtagcacttttgcactaccgttcgtcgggttgctgacgatcaataaatgtcgctgctgatcttgaatccatgctcagcgccgtcgttgtagtcgtactcagcatagctgtcgcagtagtcattaagatgctggatgattccaagaacgtcgttagcgaccctgtgacgcttcgccgcgatggtcttggcaatgctgtcgccgacttccagggtttcggcggtccggcgatggatcaacaaacggctccaaagatagagtcggacccggcgaatcatgtcacgatggcgcctcagtcggctctgcagctcttcaatttcgaattcgcgagacttgactactcgtcgaagctgctgaacttccaattccaaatcggccttagtagccatattcacctcagaaagggaaattgtctgaggctccaggaagctcgacgattgttgttgagcctgagcggtcgagtatgcacccgaccgatcctgccctatggggataatgcctgcacgaaccgtaacaagtaacttctttgacgattcgccatgtcgatcctccacaccacctacatgctggtgggcgcttcgacttcagttttcgttcgtccaggacggctcgtctgtcgcaggaaaggcagcgagccttaaccgacgtaaccatgagtgtagtcgatcatgcgaatgagttcgtcatccaccgattctctcgacttcaaaccgttcaacgaatccgactggccgttgcaatttccattaatatccatggaagacagaaagcctgccgacaccactgtgatgtcaactttatcgccagccttcttgaagccttcgcattcggcgtcgagggccaccaacgcactcgcggccatgttgacgtgactgattaagtcggggaagattacgggaacttcacgagacattccccggaccgtcatcttcatcactacatatttcatactcactatcctttttgtgtgtgaggaaagaatttgctgttttccggatggtggaaacgctcggccgcaggcggtctttcttccggacactgaatcgtcgaaggcgggaaaaccgcgctagagattatcgccgcgagcagcgcagcggatgtcgacatccacagggcagtttccagactgacccgcacttccggtcggcgcggcttcattcgctccaaccccttcccggctcataagacgggatgctgccgccgcgaatccaactgtcccacatatggctcagaccggtgggcggctggggcggcggactgtaaaagccgggaacttctgtactgctgaggaaataaggcgtgcaaacggcccgaacaaccagctgatgtcgctcccacatcttatcaatcgctcttagcatgacgtcttcgcactgagctttgctgtcgaaccgtctgctggtatgatccggcatctggacacagccatcgccagtacaaaggaaagcagtggcgatccatactgtgatgcttgccatttcgtcaccctctttggtagatgagcagattttattccatctgctcttcagaagtaaagcgcttttcgtcgggataaatgccgatgatgtctgcgtcgagcatccaaatgtccacggacggatcgtcgctattgatctgatacaggtggtacaattctttctcgtcacgcgccgattcaccgcgaggttcgacagccaatatgcggccgtgcccttcgccgtgctcatcgcgatacatgacgtggtctccgacttcatagcactcttttctgacaaggcgcgagcgcgagctgttcggcgattccactacccaggaatccacaactgcgtctttcacattgctgtaccacttcgcagatttgtcgcagtcgaacacgcccagaacttcgccgtccttcaacacgatatgtacgataggaagaagaggattcatgttaatctccattggttgataattagagtctaatctgccgaaaagttcccgtaaagaattattttctcataactgattagttgcgactgttaatgtgatgtatctgtttgaatctcttttgaacgtttgatgtttcccctataataagcgcacacaaccagcaaccgcatggaattaaaatgtttaaactttcctggatattcgggcgcaaaaaggataatgctgcctgttctgaatcggcgccggagaaagtcgcacgaatccctcaacacgatccgctcgaccctatgattaagctggggaagattcgcggctggaatgtcgagccggagaaagccccggtcatccgtagcgtgaaggattttctggagccgggcctatccgtcgcaatggacagtgcgtatggtgacggacccaccccagccgcgaaagctgccgctggcggccagaatccctatgtagtaccgaccatgctgcaggactggtataactcccaaggattcatcggataccaagcttgcgccatcatttctcaacactggttggtcgacaaagcttgctccatgtcaggcgaagacgcagcgcggaacggatgggaactcaagtcggatggccggaagctgtctgatgagcaaagcgcgctaatcgctcggcgcgacatggagtttcgcgtcaaagacaacctcgtcgaattgaaccgattcaaaaacgtcttcggcgttcgaatcgctctgttcgtcgttgagtctgacgatccggactactatgagaagccattcaacccagacggaatagctcccggctcgtacaagggaatttcccagatcgatccatattgggcaatgcctcagctgactgcagagtccacagcagacccgtctgccgaacacttctatgagcccgatttttggatcatcagcgggaagaagtatcatcgcagccatctggtggtcgttcgtgggccgcagcctccagatatcctgaagccgacatacattttcggaggcatcccgctcacccagcgcatttacgagcgcgtgtatgctgccgagcgaactgcgaacgaagcgccgttgctggcgatgtcgaagcgaaccagcaccattcacgttgacgtggaaaaggccatcgcgaatgaggatgccttcaacgcccgtctggcgttctggatcgccaatcgagacaaccatggcgtgaaagttattggtattgatgaaaccatggagcagttcgatacgaacctgtccgatttcgacagcgtcatcatgaaccaatatcagctggttgcggccatcgccaagactcctgcgacgaagctactcggcacttctcccaaaggattcaacgcgactggtgagcacgagacgatttcttatcacgaagagttggaatcgattcaagagcatatattcgacccgctgcttgagcgtcattatttgctgctggcaaaatcggaagcaatcgatgtacagctggaaatcgtctggaaccctgtggattccacaaccagccagcaacaagccgagctgaacaacaagaaagcggcaactgatgaaatttacatcaactctggcgtcgtttctccggatgaagttcgcgagcgtctgcgtgatgatcctcgctccggctacaatcgacttaccgacgatcaggccgaaaccgagccgggcatgtctccggaaaacctggccgaactcgaaaaggccggtgcgcagtcggcgaaggcgaagggcgaggccgagcgagccgaagcccaagcgggcgccgtagagggtgcaggcgacccagttccggccgcgccacgcggtactaagcccctcgcgaaagcggccgaggaaggggccggcgaggccgctacaccgccgtcgcggccgaaccccagggccgagcttcggaacctgctgtccgatctactgtcgaaactcgaagccctggacgacgcgcaggctccggacggcgtggacatagagcaggatgacgcgccaggtctgaagagaacgtcaaagccgagcgtatcgggtatggagccttcggtgttttcgtccaaccgcatcgtcggccctcgtgatcattctgaactccagaggatcaaggtcaatggaattactaccttgatcgaaaatccgcgcggaagtatccggcaagggaaggacgggagctggcgagtccagatgaagcaccactatggattcatcaaaggtacgaagggggctgatggggatgaggtcgattgcttcgtaggcccgaaccttggttcgaaacgggtcttcgtcgtcaaccaggtgaacaaagatgggcaattcgacgagcacaagtgcatgctcggtttcaacaacattaacgacgccaagtctggatatctgtcttgcttccgtccgggctgggatggactcggctccatccatgaagttgatctgcccgccttccgtcgttggctggcaaatggcgacgcgacgaagccatttggaggcaagtgatggcgttcaaagcctccaagaaacgcgaacgccgggggcctcttccagtcggaagaggcaagcccataattccttctgctggaatcgaagcctggtatcgaaagcaaatgaaggatatggccaggctcatgatcgccgattatcgaagtgaaatagagaaggccatatcccagcctgcggccgaacggtttttcgcgaaagatgaatcggtgaacgtcctgttcaagatgactctgcgaagccttcagcagcggtggaatcgcatctttgaaggtttcgcggcaaagatcgccccggagttcgtcaatcgggccgacgaagccgcgaccgctgcgactctacatagcctgtcggtggccggtgtcgatcagccgcgagcttcatacagcgaaagcgtcaggaacaccctggaagccgcgactacttacaaccataccctcatcaccaacattcaagaggaagtccacgagaaaatttacacatctgtgatgttgtctctgacttctccaaacccagaggaacaaggaacttccgggataacaaatgcacttagagaagtcggaaagttttctgaaaaccgaatcgaactcatcgcaagagatcaaaccagtaaactttacagctcgttgagtgatgagagaatggcagagaatggagtcgaagagtttgaatggatgcactcttcggcaggaaagacgcctcgccatacccacctggaaaaggacgggaaaagattcaaactgaatgaccctagactttgggaaggtccaaaggccgaccaaggaccgccaggttgggcgattaactgccggtgcagaaaaatcccaatcatttagtcgtcgataggagtgcgatatgccgttagtccatggaacttccaatgaagcccgttctgaaaacatcaagcgggagattgaagcagggaaagacccgaaacaggcagccgccatagcctattccgtccagcgcagcgagaaagggaagaaggagaaagattgttcgcctgaactcgtcgccgatcttcgcgccctggtagactcgctgtcgaggctcgtgaaatgaaccgaaagacatgcatacgccgactcgcgaccgatgtaatcaaggccaatattaacggcggattcttcagcctgaagtttgccgcagttgatctggccatcatcggcgtctcaatcctgattgctttcggttgatgatgccgcgaaaatccggattctgaacaaaattcgggtccggatagccgcaaattaccgtttctggtaaatagcggtaatttggaaagcctactgccgcaaggctttaacatgctaaattcctaatttccaatttcgccgcatgccgaaaaagtatatagcatgggaaattaggaataacgttctaatagaattcatctataagtaacgttataatataacgtgaatcgatatgctctatacgtattgaaattcaatttttaattggtaaattggtaatttggattagtttaaagattgaaagtcttgcggcagtaggcttagacaaatctcgtcaaatttccgaaaccaagttaccagttttcgcggctgaggaaatccggtaattagatcacaatacagattctattgtaaattaacagtcgcggctacatctaattattgttccgcttatttacccttggatgtcctgcgtatataatacagccatagtccacgactcttcgaattaacgatggcaaagtcgaaaagaaaaattgacgaaaatggatatatgaccatcgagggctgtccaatcagctcttatggcattttccaatattctgccggtcaactcggtcttccgggcgatccgatgcggattgtcaacgtgtatcgtccggagtctgctgttagcgatcctgagtacatcgaatctctgaagaatctcccgctgatcgacgagcacgaaatgctgtcgggattcgacggcgatgacgacggcgtggctcccgaagacaaaggcgtggaaggcatcatcacagccaacgcctactacgaagctccatgggctcgcggcgatatccgcatctattcccgcaacatgcagcatcagctggaaaggggcaaggaagatctgtccctaggctatagttgccgctacactgagcaacccggcatctggaatggaacgccttatgaagtcgtccaggacaagatgcgcggcaaccacatcgccctggtaaaagagggtcgtgtgccgggggccagagtattggatggtctgtgctttgaccatctcagttttgatttcagaccatccgatgagggtaatgaaatgggtctcaagaaagccaagcagaagactcctgtccagcgcgcaggacaagctgctgattcggcggtagaagagttgcgcgccctgtggccgaagctctctgcatctgtccagaagttcctgggcgaagaggcgcaggagccggagcaccaggaaggcgcagccgctccggccgaaccgaccgacagcgagcacatgaccgagcatccgactctggaaggcgctcaggaagacgacgaagagcacgaagaagcgccgtccgttgtcgatcctgccgtggccgccgtcgatccggagcatcaagaaggtgccgcatccgaaatgtccggtgaaggcgaagtcgccgaactgatctcccaggtcaaggccattctggctcgactggagggcacggtagccgaagaggcggacgaagagcatgacaaaggtcaagatgtcgtcgagggcttggaagaacagagcatcctcagcggcgcgcaaaccgccagcgacgatggtggtgagggcaaggataacagcgaggaacttcctgaaatggcacagaagaacgcgcaagatgctgcaattcgtggtctctatcgcgacattgctgctaaagatcgcctctacaagcgtcttagttccgtggttggtgcgttcgatcaccgagctatggactcggctgaagtcgctgtttacggcgtgaagaagctggcgatcagctgtgagaagggccaggaagttctggcgctcgacatgtacctgaaaggcgtcgaagctgctcgtggcgcggccagccgtcaatcgaaagcccaggattcggccagttctgctccgcagtgcgccgagctggacagttacctgaagggggagtaacccatgttccagaaacaagtctatcgccagtacactcctggttttcctggtgatctgatcgaggacggcccgaagcgtgcgcggccgggtcggatcatggcgttggcatcggtcactccggccgcgactgccaccggccccaaccgcatcagtcgcgcgttcggttacgcaggtgatgtcggctccctcggtgaaggccagccgaagaccgttgccgcgcgcgcttctgaagtcgtggtcggcggcgcaaccttcttcggcatcctcggccacccgaagcattatgctctgtacgggtcggccggcgattccctggcccccagctatgacctgcccgatggctccgaaggcgagttcttcgacatggccaccggcctggtcgtcgaaatcttcaacggcgccgccaccgccctggatttgagttacggcgatccggtggcatatgtaccgaacaacctgcctaccgccgacaatgccctgggcctgccggccggcgccctggtcggtttcaaggctggctccatgccaaccggcctggttcaaatccccaacgcgcgtatcgtcaatgccatcagcctgcctgcccagtcggcagggaatctggtagctggcgttaccatcgtccagctcacgcagtaaggaggcgtcatgagccatatcagtaagacccattcgcgcctcgcaggccgtcacgcaaagccattcgacctgaagaacgtcacccacgaagccgtggccgccctgggtcgcatcggcctggtattcgatcacgccgtcgtccaggaccagatcaaggccttggcgaaggccggcgcattccgttccggctcggccatggacagcaacttcaccgccccggtgaccacgccgtccatcccgacccccatccagttccttcagacctggttgcctgggttcgtgaaggtcatgaccgccgcgcggaaaatcgatgagatcatcggcatcgacaccgttggctcctgggaagaccaggaaatcgttcagggtatcgttgagccggccggcactgcggtggaatacggtgaccacaccaacatcccgctgaccagttggaacgccaacttcgagcgccgcaccatcgttcgtggtgagctgggtctgctcgtgggtactctggaagagggccgcgcttcggccattcgactgaacagcgcagagaccaagcgtcagcaggcggccatcggtctggaaatcttccgcaacgccatcggtttttacggctggcagagcggcctgggcaaccgcacctatggtttcctgaatgaccccaacctgccgccgttccagactccgccgagccagggctgggccactgccgattgggcgggtatcatcggggatatccgtgaggccgtccgccagctgcgcatccagagccaagaccagatcgacccgaaggccgagaagatcaccatggccctggccaccagcaaggtggactacctgtcggtgaccacgccttacggcatttcggtttctgactggatcgaacagacctatccgaagatgcggatcgtgtcggctccggagctgtccggcgtccagatgcagggccaaacgccggaagacgccctggtcctcttcgtcgaagaagtggacgcgtccgtcgatggcagcaccgatggcggcagcgtgttcagccagctggttcagagcaagttcatcacccttggcgtcgaaaagcgggcgaagtcgtatgtggaggatttctccaacggcactgccggtgctctttgcaaacgcccttgggctgtggtgcgctacctcggcatctaaccgatgctgactcaccaaaggccgggcttccggcctttgttcactctgactctgactcggttgtaggggccggttagggcataattaataggactacgccaatgactgtttacatcgtttccgcaatgactcaatccgtgtcttacaatgcgtatgacacctctgatccgtccaaccctcgtctccagagaaaggtgctgattcgcggccgcgctggcattgcatccgaaacatccggcttcggcgacatgatttccgacgcatccgggcgcccgatctggacgccgcagggcgattgcacggcggtgagcgattccgatttcgaactgctccagaccaacaaaatcttcatgcggcacatggagaaaggttatctgcgagtcgtgaaaaccgacatcaccaatgaccaccagcggattgcgaaagagactcgcaccatggagcgcgatggttttcagcctctggattctgctcgcctgaagcagaagattaaagtgaatactgccagcgcttcccaggaacaagagttccgggtttaaccgagggtttcggtatggtaattttcgacgagcaaaagtttcgcacgctgtttccggagtttgctgacccagagtcctatccggctgtgcgcctgcagctttatttcgacattgcgtgcgaattcatttctgatcgagattctccataccgaattctcaatggcaaagctttggaggcctgtctgtatcttctgacggcccacctcctttcgctgtcgacgatgcaagttcagggcgcggccggtggcggggtcacagcaggtgggacccaaggcggtttcatcactagcgctacggtcggcgaggttagcgttgccaagctcgcgccccctgccaagaatggttggcagtggtggctttccgggacgccttacggtcaggaactgtgggcgctcctgagtgtcaaggcagttggcggattctacatcggcggccttccagaacgtcgaggattccgtaaggttggagggacgttctggtgatccctggagctaatctgctgcgtatggcatttagcgtcataggaacgcagctcgttcagtatcgcaaattcgagcagaggacgaagaatagccaggcgcagtacgtttctgtgtttggcgagccattccaattggccgcttccatccaaagggttcgtcgcgatcagtatgtccagttcaatctggagtttcaacgaaattacgtcatgatcttcgccaactttgagatggttgacttggatcgagatttggccggcgaccagttcatctggaccggaagagtttttcaactagagtctcaaggctcttggttttatcaggacggctggggagtctgcttagccgtggatatcggtacagccaaactagctgaagacggaaccctgactttctaggtggcttatgttcgacggcgaactgatagaaaaattggtggtcgagcttacttccgccatgacgtcagccaaagaaactttgcagtttcctgattttgaggttgtgcagaaagcccagccgacccaacagggcacgtcaaccaagcctaccatcttcttccagaagctgtttgacatccctcgcggctggccggcaaccgattggtatctggacaacgtcgccagaaaatatgtagaaattactcgacagcatgtcgagacgacttttcagataagttcccttcattggcagaatcctgagctggatcacgtagtcacggcagccgatatcgccaattacgtgagagcttatttccaggctcggtccaccattcagcgagtaaaggaactggacttccttatccttcgcgtgtctcagatatccaacgaggcattcgaaaatgacaatcatcagttcgaattccacccaagttttgacatggttgtaacttacaatcagtatattcgtctgcacgaaaacgcagcatattcagccgatggggcgctgataggcatatgagcctgagacgcgattcagaactgatcgccgcgcacctgcagatgttaagagccatgcgcggcaggtccgtttcggccggatggtattccaccgctcgatatcctgataaggcgggcggatcggtcggaatacaagtcgcgagaatcgcgcgcctcaatgagtacggcggaactatcgaccatccgggcgggaccaggtatattagggacgccattgttcggggtcggtttgttggcgttcggttcgtcagaaacgattttccgggagaaaccgaggtaacaaaacctcacaggattacaatcccggctcgaccgtttatgcgatatgcttggaacttattttccgcagatcgcgccgcaatccagaatcgaatagccatgaggctggccagaggacaaattacgccggatcaagcgcttgcccagatcggcctggcgttggaaggatacatagccagaagcataaggaccgggccatgggtggctaactcagcatctacggtcaggagaaagggtttcaacagaccgctggtcgatacggctcacatgctccagtcgattagcagcagagtaacataaaccaggagatcatccagtgatcagtcagagccgttatatccggatcatttccggcgtaggcgcaggcgctccggtcgcaggccgaaagctgattctgcgcgtcatgaccaccaacaacgtcattccgcctggaatcgtcatcgagttcgacaatgccaacgcggtgatgtcttacttcggcgcccagtctgaagaataccagcgcgctgcggcctacttcaagttcatcagcaagagcgtcaattccccgtccagcatcagcttcgctcgctgggtcaacaccgccatcgcgccgatggtagttggcgacaacctgccgaagaccatcgccgatttcgccggcttttccgcaggcgttctgaccatcatggtcggcgcgtctgagcagaacatcacggccatcgatacgtccgccgcgacctccatggacaacgtggcgtcgatcattcagaccgaaatccgcaagaataccgatccgcagttggcccaagccaccgtcacctggaatccgaacaccaaccagttcaccttggtcggcgctaccatcggcaccggcgttctggccgtggcgaaatcggccgatccgcaggacatgtccaccgccctcggctggtccacctccaacgtcgtgaacgtcgccggtcaggctgccgacctcccagacgcggccgtggccaagagcaccaatgtcagcaacaacttcggctcgttcctgttcgccggggcgaccctcgacaacgatcagatcaaggccgtgtcggcctggaacgcggctcagaacaaccagttcatctatacggttgcgacctctctggcgaatctcggcgctcttttcgacttggtgaagggcaactccggaaccgcgctgaacgttctgtctgcgactgcctccaacgacttcgttgagcagtgccccagcgaaatcctggccgccaccaactatgacgagccgggcgcttcgcagaactacatgtactatcagttccctggccgcaacatcaccgtgtccgacgataccgttgcgaacaccgtcgacaagagccggggcaactacatcggcgtcacccaggccaacggccaacagctcgcgttctaccagcgcggcattctgtgcggcggtccgaccgatgcggtggacatgaacgtctacgccaacgaaatctggctgaagtccgccatcgcccaggcccttctggatctgttcttgaacgtgaacgccgttccggccagcatggtcggcgaagcgatggctctggccgtcctccagccggttctggacaaggcgacttccaacggcactttcacctatggcaaggacatcagcgccgtccaacagcagtatatcacccaaatcaccggtgatcgtcgcgcctggcgtcaagtccaaaccttgggttattggatcaacatcaccttctccagctataccaacagcaacaccggcttgaccgagtggaaggccaactacaccctgatctattcgaagggcgacgcaatccgcttcgtcgaaggatcggatgtaatgatctaacggtttgcggcggactcgaccgccgcaaccttccatgaatggagtgaggaataagcaatgatcaacatttctgcgttcggctcgattgcccaattcacggcaagcagaaccttcccgaacggattcacagtgaccgagttcgctgatgatgcggaccccatcgacagcccgccgttcactgcggctgataccggcgtcggcctcaatggcgatatggtggtttggaaccgggccaacatcctggaagtcgtcgtcaacgtcatcccgaacaccgagggtgagcgcaacttggccgtcctgctggatgccaaccgcaccggaaaagacaagtcgggtgctcgtgatgtcatcggtctggtcgtggcgatgccggacggtagcaaaatcacctgtaccaacggcactcccatcgacggcgttctgatcaatgcggtggcgagcgttggccgcctgaagacgaagccgtatcgattccgtttcgagaaagtggtcaaagccggtactagctgatgaagaagattccgctgacagcagtcccgaatcaggcgatctcatttaacgccggcagcagctattggaagattcgtctgtaccagaatctggatatgatgaatgccgatatcagccgcgacggcgtgatcgtttgtcatggggtccgctgcttcggcggaattccgcttctccagtatagccaccagtatcgacccgactatggcaatttcgttttcgaccgtgacgccgattggacgttgttcggcgacggcataaacctgttctatctggacggtgtcgagttcgcagaatatcaggcgctggccacgaggaaagaatgagcacatcaacgatcagaaccggggcgaacaatgatatccttttggacgacaatggaaacatggtcattctcagggatgtagaagcgtgcgcccaggacgttcgggcggcgatgctcatgcgcaccggcgaaaacattttcgatgtggacgccggtgtgggatattttgaatatatcttctcgccgcagaagagctatgatgacgctcgcaaatccatcgcggatgcaattttgtcatcgccggacgtgaccggcatcgagcaacttgacatcgacatcaccggtgaagtcttcggcgtcgatgcgaaagtcatcaccatccacgggcctgtaactgcaggagtttgaaatgagtaccatccgcatccaatacgccaacggcacccaactattcttggacggcaaaaacccgccgctcctggacccgcttccttctttcaacccgtcggtcgaagacctggaaggcctggaccgcgaaaagaacactggcaagggcaactcttcgtcggccggtattcccgttcccccggtgaacgtcgatccgaatgtcgacaacggcggtgccatcccagctccggcatcgaccggcgcccctgcggccggatcgaccccggaaagcgcccaggaagcccctgcagagggccaaggcgacgagaaagggtccgagacgcccccgactactaccaaggaagaaaagaccgaggtagaggcctctgcggccgctaaagaggccaccgccactaccaagcccacggctcgcaaaaccaccagcaagtaaggactcgacatgatcaacgtcagcggcttcggcacgggaattgtgatagtttcaacctcgtcgttcccgatggggttttccttgtcgaagttcgctgatgatgagagtccgatatcatccaaagagctggagccgttcgggtatgagatgctttatgatggcggtctgtttgccttcgataaggcggcccctttggaagtgtccatatccgtaatcgcagggagcgaagatgatattaatcttcgcatccttctaaattccaagaagggatcatttcgattccttccaggcgtcattccagacatgacgactcttgttgcaactcttcccgatggcggccgcactgttctgtccaacggaactatcatcaagggtccggccatagataccatccagaacaccggacggcgcaaaggcaacacgtatacttttgttttcggcaactatctcggcgcccagactgcgcgtcaagctatttctaacgttattcaatctgttctggaggtgatctgatgttagggattttcaccagcctcctaagctcgcggtctttttcgattgtagatcagaatacaaaccagctagttgctgcggatttgaggataagccgggttaacacccggttttcttctgtagggcagcgccacatgctggaagacggtacgacaaagatggactccagaacggtccatcctatggagataatcgttgaggtattctgcccttcaattgatgtcgtagatcagattaatcaactgctcctggatcgtgatacgctgtacaaagtcatcactcgcggcatggtattcgaacggatgatgtgtaccagcgaagcgcttaatcagacgccagaaatgatatcggcaactcctgcgcggctgacattttcccaagtgctcgttcagaatcccaaaccaatcatgttcaggaatgctggagactcttccataatcgaccgagggttggccctggccgaagacgttgtgggctcggccagtgacctgttcgactacgcagtgaacggcgtccagaacgccgcagacttgttctgaggtgccaattgaactctttcctcaaggccattctcaacacgcctactctcaccatccgtgatgatgtcaccaaacttcccgtttggaagagtctccaagtcaagaaagtggaaatttactcaccggcttccgtagtgtcgaagcctttggcgacgaaagaccagacggaagctcaggtgtataccgaagcgctggacgttgatgtaaagaacgggaagatcattcagccagtgcggcttcgcatcaatgccatctgtccagacttgtccacagttgaaagtatcatgaatgctttcaatgacaatacctcgactttcgccatcacttccaagtcgatattggctgataaaatggccatcatgacgctcgatgtagatcaatctcctgacatgctaaatgcggctgagatcaacatggaattcgagcaggttgagcctccagtattgaatgaatttgatccggctttccctcaagatcgcccaacttatggcgtgcagattcagtccctttccgatgcaaatttgctagacttgggagccaccggcgattcgatatcttcggccgcaaaatcgctatataatcgcgtgaccagttatttctgaggatgtatcatgcttgaaatcaaccttcccgatggccgccaaactcgcgtacaaatcgaggcgtggtcggcattggacggctgggaactccagcgccgtttcgtcgagttcgcagtcagcaaggatgccgacttccgccgcgctttcaccatggaaatcctgagctatgccaaagtcattctcggtaacgatgattccgaaattccgttgactactgctgcggtcatcaacaaccacctcggcaactggaagaacgttgaattcgtcttcgattccgtcctcaagcacaacggcatcgatccgacaacgcacgccgaccgcccggactattgggagcaagccggttcgcagatggcaatcgcatttctggccgaggcgtccaagctcattgggccagctatgaaaatcgccgaaggactcgccagcaagccggagtaattcatgtctagtgatttggatgaattcatacttcggtatgaggccgacacggccagagccgaacgaaatctggaacgtctccagaatcagatcaggcgcgtaaacagcgcatcgactagtggccttcaagatttgcgccacttcgcagacggcgctgcaaccgaactcggccgcgtggttccgcaggttgacgccgtaacgagcgcgattcgcgggatgaacgcccagctcgcgataggcgctactggcgtggccctggtcgcggccggcgtcaaggcgttcatgaacaccagggaccagtacaaccagcagcgcatccaggcgatggatatcggcatcgccccggcgcggctggaagagtaccagcggaaactggcccgccagtctggaggcacgatcagccgcgagcagggcgcggaaatgaccaaaaatctggccgatactttccggcgagcttatcgcgatatcggacgggtcggcccagaggcgcggattctgcgcatggccggcgtagatgtcggaagcttccagaaaggcatgaggccgctcaacgacatcatcactgagctggccacgaagatggccaagttgaaaccggacgagatttcggcatatgctgatgccctcggcgtctcgcgggactatctgagcaccctggcgaagatcggcccggcaatgggcaaagtcactgagatgacgtcagaagagcttcaggctagggtcaggggcgagtcaaacattcagaagttcaatgatgctttggcaaacctcaaccaaacgttcacgactctggaaaaccgcgttggcgaaaaactcgcgcctgcattcaccaagttgatcgaaatcatcgacaaaattgtccaggccattcccaatgaagtggaagaattcgccaaggacacgaaagcccgctgggacgatggaatcaccggaaaggccactgtgggcggcgatatcctgtcccttctcagccctggtgctctgctaggtcgtctggcctcctggggcactcggcgcggcatggaagaggccggattaatcgacaagtcaaaggtcccaggctcccaaggccaaaccagcgaagacctggccaagaaacaggaagaccaggacaaagctacgaagtccatgaaagagctggagaaattggccgaccagactacgaagtcaacgaatgatttcgcggtggcgatcaacatgttcagcggagccgtgtcatcgttcgccaatgccgttgacgagcgtcaagcatgggcggcatgggcgggggaaatcgggcgcgcagttggcatgggaagcaccgcgccgacttcgcgagcaacaggggtttatccgcacgcgatctacgatcagtcgaagagtggcgcggccggacaagtattcggcgagcctattggcgcccagtctctgcgaaacaggatgttctcgccgcagcgcaaggccgagccgataaatgtcccatcgtacatcaatgatatcatcaaagatgcgtctaagatgtacaacattcctgagctggacatcaagaagctcatatacactgaaagccgattcaacgctagggcgaccagcgaagccggggcgaaaggcctcatgcagctgatgccggaaattgccaaggcgtatggaatcaccgatgtgtatgacccacgccaaaacatcctcggtggaacgcgcctattgcgggaaaacctggaccgggccaaaggcgacatgcgattggcgttgacctactaccatggcggcctcgacccgaagaactgggggccaaggactcgcgcatatcctggtttggtgatgagcgcaccaatcgaactgatggaggaagcccagcgcaagcagaaggctgcggccatgacggtcgccaacgagacgttcgcgccagaaggtggcgacatggacattcgcccctatgacggcggaaggctggaagctccggaccagggcaggaaggaggatgatcgccgtgaagctcgtcgatatgacgacagagttgtccggccggagattcgcatcatcgaccgcatgccagaccgcagtgacggcgaaattcttaaaatgtctcagcgccaagacgccgaccgggcggactctggattccggaaattcccgaaccaggttcgtggcgagacaaagcagaacatccaggcccaactcactgccggagctattgcccaagtcatcggtgttaatcctaaccaaattatgcgccgcgaaatcagccgttccgacttgctgttcggatacaaccaggccatcttgggcaaacagcaggaaatcaaagccgctgcgacagaggccaacaatgtattcctctctccagccaaactcgctgaggctactgccaaggtgaacgccgcatcgcgagaaatggatattctcaggacgtatggggagaaacttctgaagagtgctccagagcgcggccaggaactgacaataggtcgaattgatatgttggtcaacgtcaccggcgcgaattctccagaagaggctcgcgaaatcttcagcaggcaaaccgcagaacaactgactactgccatccaggactcccaaaacgattccgcaactaagatactctactgatgaaaaagagaattctgcgagtcacattcaatatgccctatggacctgaaatcatccgtgaagacctggatgttcgggtccggattatgaaggctgcattgcgaattcaaaaccgagctaccctggaaatctttggactcacgacgcaattgcgcgagtctcttctgtcgcagtttacggcgtggaagcaccggcagcgccaagtcggaatggaagacgagctgatgatcagagtatctgttgaggccggctattccgatcagggccgcgaacaagtttccagagtatttgtcggcgaagtggcaattgtcgatgtcatttcgccgccaccggatattggaattcgcatccaatgctacacaaggcagatcgacaggacgaagactattcgaaatatgccgccagccaacacgacgtttgtaaagttcgtcgaatggggcgcaaatgaaatggggcttaacttcatctgcgacaccagctacaatgatcaagttttgaagaatccgggccggtcgatcactgtcgcgtcggcaatcctggcatcgattcaggatatgtacatgccggatgtggccgcgttcgtcgatgatgacattctggtcgtgaaggaccgggataaggtcattcgtcctgatgaagttgccaacatcaactcattcgtcggcatcccttcatggtcggaatggggcgtggaatttcagtgtctgtttgaaccgtcgattcgcgtggctggcggtgtcgcggtcgaatctctcatgaatccaagcgtcaacggcaactatgtgatcaccgctctagagtatgatttgtccagccgggatcggccgttctatatcaaagtcatggggagcccagcagcgtaatggccagggaaatcaaatcgttcaatatgttcggcgtgcactacaactcgcggcagttctctgcggtcgatggactcaggatgatgtcgggaatccatgatgttccgccggaagaattgctcaaagggaccgacgtgctggcccatacagaggaacaaccggaaggcgtctggcttcccttgaccgctgcgaacataaatctttatgtcattgaccgggcgaacgtaatagctcccgtacaagtgcttgcgcttttgtctgaactggtcatagattggaactttggcttcctcaaagattggacaggggtcaaaattccagccagatttgtcgaagatatcaaaagtgtgaagacagcccattcgccttctgtggtcgcaagtttggtggcgaatgggtcagcttctatgcgcgagctggaagagtattattcgactcaagatgcctttaagatgattgacatcatgacggcgaagagcgtgaatgaggctctagcgtccgaagcatcacagaacagaatcaaaaagggataattcctaagcgagcctgggaaggctatactagaccggccaaatcagaggctttcccatgtccaatattcctttaacatcagcaaaatctaccgacagaacgcgactgatcgccgctcttgacgctcggtcgcggcgggacgcgctcgactttgaagtcatgattcccgcccaggttgttcaatatgatcgggccgaaaatatcgccacaatccaacctctcatcacctgggttgatactgaacacaatgccgtccagcgacatcagctggttgacattccggtgatttccatgggcgctggcggcttccacataagtttcccgatccagcagggggatatcggctggatttacgcggccgaccgcgacacttcccagttcttagagtcgctatcgatgtcgaagccgaacaccggccgcatccacaaatttgaacatggaatgttcatcccggatgtattccgccgatacaccatcaattctgaagactcggccgcgatggtcatccaatcgactagtggagcgacccggatttccattcgcggcgacaacatcaagatcactgcgccgtcgaatgtcacagtagatactccgcaggcgaatttcactggaagtgtgactatcgccaacaccctggttgtaaacggcgtcaacgtgaacaaccacggccacctcgaaaacaacccgcctgatgccaggacgaaaggcggcatgattgcttaaggagaatttcatggctaattttgatttttatgatttaacagcgggggggggttgtaatggctaattatgactacatagtagatactggagtcatagtcgccgatactgctgacgttttgaaagacgttgaagcggaattcagagcggccctcggcgccaacatcaacctggcggcttcaacaccccagggaactctggtcgcggctgagaccattgcgcgttctagcgtgatgaggaatgaagctcgcattgccaacaccatcaacccaaacgtttccttcgggacgttcctggacgccatctgtgcgctgatgggaatcgagcgcggctctgatctttcgacgttcggctatggcgtccaagtgaccggccgcagccagacccgaatttccaccgggtcgcgtgtgcagactccggccggagcgattttcacggtcatgagtgacgttctgattccggcaaccggagtcgccaccatcgacgtaaaatcgcaggaatatggaaacatccctcttcccgtaggaaatctgatcatcatcgatggaaccatcggttgggccggagcgaaagtaatcgcttcaactcgcgtcgatcctggcagccgccaaatgaccgatgcagaattgaagaatgctcgcgtcaatcgtttggcgatccaaggtcgcaactcgactttggccattaaagcgtatgtcagcgccgtacccaatgttacctcggtaaacgttatcgaaaacaataccggcacggttcaagttgtcaacggcgtatcattcacccttccgtatgcggtctgggtctgcgtcgccggaaatccggataaacaggctgtcgcagatgctctgtgggcagcccacaacggcgggactccctgggactatggcgcggccaataatggcgtcccggtggatgggcctactggcgttcctgttcgcgatccggcatccggtcgaaagtatgtcgtgaagtggactactccgatcatgtatgacggatatgtaaacgtcaccgttcagcagggctcttcctcggtcgctccggaagcaatccaaaacgcagttgtaaattacgcccaggggaaagtggagggcgaagaaggattggtcgtcggcgcgagtctgtctgcatttgaagtggctggggctatcgctcgcgagattcccggtatctacatcaaactatgccaggtggcttgcgtcgcggctggatcgccggccccggctcccggcgacttctcgccagaatacgtcatgagcgcattcggtcaggctaccatttcggtaggtaacgttagggtgactttcgtatgactttgcctgcgtacaattccgatattcaacaggcgctgaagtggctccaaaaccaggctcctgggatcaccggcttggttcagcgaaaagctcaatggtatgatcgtttcagccgtcaattttgggtgaactgggagcgcgacgttttcaatttgaagactgccaacccgttcggccttatggtgtggtgcatcatcctcggcacgccttcgaaaggcttcggcctgtatccaaaaaacagctcttgggcgttcggtcggctgcgccagaacttcgtttatagcgggaatcaggttccgccgcctgcagacgcatcgccgggcggcaacttctacggtggcggcaatgccgaaatcctcaacttggacgaaatcaggaaagtgcttcagctaagatatgtagcgctgatttcgaacggctcgattgcatatatcaatcgcatgcttcgctacatattcaacgatgatgagccgtgggacgaggcggccgggttgtacttctatctcatggactcaaccggcgagaatggacctgtggagaacttggccatatatcggaaagattgggaaggaatggtgttattgtccagttcgcccagaacgaaccacgtactgacatcgacccctgccagcgacgccgattggccgggtgtcgatccggccgcgagcggccgtccggtaacggtcgaaacggcgtccgctacggccccggacggctccgctacggtgtgcaagcttactaagccggccgggagtaccgcctacgtctccgcgccgatagatgggccgctggggtccggtagcactgtaacgttttcgttcttcgcgaaagccgaatccacccgtttcattgcagtccaatcggctgccgatttccccagtcgcgccgatgccgttttcgacctggactccgggaacgtgatcagcgatcagatgttggacagcagcgtggtaagcgccagaatgattcgtttggaaaatggctggtggcgttgcgttctcacgaccaagaccgtcagctcttcgttccgcgctgcttacgtcgcgccggcagaaaccaacttcagctggattgattctaattcaagtatggcgattgacgtgcttatctggggcgctcagatcgaactgggtgatactccaaccggatacttggagactaccggggcgcccgtaaccatcaccgattatgtcttgcagaatgcccagaccggaacggtcgatttcacccagccccttccgattggagtagaagcgtattggactggcgactggaaaggcgggtctgcgaccgagccggccagattcgcggtaggggatgggactcaagatacattcaatctgtccagtcctgcatacatcggcctacccactagtggggcattcaagttagaatacagagttggtccggcgcttaatttgtcgccgcaattgatcaacctcatgaatgaccgggcggtcggtatcatgccgacttgcgccggttgcgatgtaaaagtcattcaggagtaatgacgtgatcacacccgaactgatacccagtccgtttgctgcgcagggcgacaaagacccgatcccgcagacctcttccactggctttgccaaccttcgcgatggctacacgccggactacgaaatcagtctggcgtcgaacaacccgcaggccaaagcggtcgagcggaaaattcaaaaccaactcttcttcatcgcgacccagaacgcacaggcgtggcagcggcaaatggccccgccgtggtttcagggcatgccgggcggctacgaacagaatgcagaagtcgtgcgcgtcggaaatgacggcataatgcggcgctatcgttccatggtgaatgccaatgcgagcgaccctcttagcagcacgacttgggaagaacaacccgcctggtcggtgatgcgctccagcatcccgatgccggctggaggcccaggcctatcttctggcggagaagtcatcacgactggccgcaacttcaacgatttgttgaatgggacgtgggagttcttctctgattcagtagtcgtcgcttctcaaaacgcccccgtatatccggcgtccgctgctggcatgttggaggcgaaatcttggatatccgggtccaatacgttctgcgttcaacgctacactgaccgcgtcgggaacgtcgctgtgcgcgggcttaatgccggggcatggaccaactggatgtatgctgtaaacgtcatggccctccaacaaggtcgagtgacctatggagtcgcggccggcccggcgaacgcttacacgttgacgctcgttccgcagctccaaggcggcctggtggacggcatgatccttcgggtcaagttcaacaccgtgaacaccggcgcctctaccatcaacgtctccggatttggcgccaaggccatcgtcggcgcagcaaacttcccgttgactggtggagaactcggccaaggactcatcgctgagcttgtattcgacgccaccggcgaccgctggaggattctggcaggcgcgccgcgcatccaagtgggtaacgcagatcaggactaccaggcccccagctggaaacaggtgaaggactatgtcgcgtcccaaaagctcaccgaagtggattgggccgatgtcgtcaacaagccgaacgtcgccatccaagacacaacgccgtggttcgccaatttggagctgtctgacgctcggcctttcatcgattttcatttcaacaacaaccgcgccaaagacttcgactatcgctttatctctgaggctgatgggtcgatggcattctattctcgccaggggtctgccggtcctacccaggacatcctgttcagcaggtcgaatgtaacattcctccagccgcgactggatgttgcgaaaaacctcgcgtacatcgcgaactctggcccactttggcagaacaccactgccgatcagcctggttggaaattcaccttcgcccaaggtgtggacgccaacaacaacgctgtgatcgcagtcaataccacaaatccggacggctcttatcgctcgcaaatcatgcgatgggattgggcgtcaacgaacgtcatattcaacaaccgtcctctgtttgctggacaatatgttccgtgggactccggaaactttgatccggctaccaagctcactgtcgggactactaacaacatttcggggccgaccggaattcgcaacaccaccagcaacaccggaaatatgaacacctggggttccagctccacgactgcatcatatggcaacgcggcacttcaaatcttcggtagagggggtggcgagcctgcggccatatacttcgacaactcccaaaccggctggtatttgggaatggacaaggacggccaactgaagcgagcaggctggtcgctcggcaataactcctatgtggtcaccgacgaatccaacattcgtttccacgtgaattccatggctggtactcctgtatggggcggaaacgaattctgggggccgtggaacttcaacccgaacaccaagttgaccatcaaagccggcacgcaggaaactagcagcactgcgatattcagcggaacgctgccgttcgccccaatcgcgtctctgtccgactattcccaggcgccattgacggtttacaactcgccgactggtccatccgctaagcctgccgttatcgcgttcattcgccctggaaactggggagcgttcttcggcatcgataccgacaacaagctgaaatggggcggcggatcgctcggcaacagctccagggaaatcgccgattccagcaacatcatgaatctttgggcggccaacccgaccgcgccgtcctggaacggccaaaccgtctggcgatccggaaactttgatccggcaacgaaagtggatttgaacgccgcgaacgccaccaacggaaacatgatcttcaaccgcatcgccggaactggtagcgggatcgcctcttccggccgcgtcggcgcaatcagtctccagaacggcgcaacggcaggcgccgccgcagccgtaacattcgagcgcggtggcggtttcttcgtcaacttcggtttggacacagacaacgttctcaaagtgggcggcggaaacctgggggcgaacgcctatccagtcatccacgccgggaactacaataactacattaaccaggcgctggttcaggtcggtctgggcggagtcggttcctatggcgttttcgcggttttggataatgccgctccaaccgcaaccgttcaacccggagttgtcgtggacggttccattctcatctactcatcttgctccgcaaactacaatagcggtcaaagacctgccggaacttggcgctgcatgggctatgtagtaaaccgggacgccaacacccctgactcagcgacccttttccagcgagtgacgtaaaatgaaatggacgcggattagaaacccacgttggctggacgcagtaaacatccacgccatggtgactttcgagggaatcggtgaagtgccgttcaccgccaatccgcaagacgttgaggcccacggaagggccatctacgctgcgattctatctggggagcacggacctatcgccccggtcgattcgaagcgggagaaggccttgcaggacgctatacgagccagggaaaagcgggctatccttcgggatacccgctggcccatagatcgccacgacgagcagagacggctgggtatcgaaaccacggacggccctgggctgatcgcagcccttgttcactggaggcagcagattcgcgactggaacagcggggatcggccgcgacttcccatggctctgaaaacaatgttcaaaaatcaggagtactgatgaaaataacgaaggatattttgatcaccggaaccgggtgtaccacggatcgggcgatcaagtggctggatgacgtccaggcggccatggataaattccagatcgagtcgccgcgagccatcgcggcttacctcgctaatatcggcgtcgagtccggtggattggtgagtctggtggagaatctcaactacagcgctcaaggactggccaacacttggccgcgccggtatgccgtggacccgcgtgtccgtccgtatgtaccgaacgctctggcgaaccgcctggctcgcaacccggtcgccatcgccaacaacgtgtacgctgatcgcatgggtaatggctgcgagcaggacggggacggctggaagtatcgcggtcgcggcctgatccagctgaccgggaaatcgaactatgccctgttcgccgaagactccggtatggacgttctggagaagccggagctgctggaaacgccggccggcgcgtcgatgtcttcggcatggttcttctggcgcaatcgctgcatacccatggcggaatccaacaacttctccatggtcgtgaagaccatcaacggcgccgcgccgaatgatgcgaaccacggtcagctccggataaaccgctatgtgaagaccgtcgccgcgatcaatcaaggttcctgatcttctccgaaaagaaaaggccgcttattcagcggcctttttgctttccggctttgcctcttcaatctttctgacttcagtaggcgcgacggactcttcctgggtaactgagtccacatagttccctagcgaactcaaaacgccgattaacagcgctcttaccactttatccttgactgtctcgcctatgatctttgtcagaacggatatcaactcttcccggagtcttgggcttattcttggccgaaagcgcttgcgatgctctttgcgtttcatgtttagtcctctgtttgcggtcttctcctcaccccgataatggcttggggatgcactgtgttaatcggaagggtcgggcgttattataactcgacgaaaatgctcgcgcttaactgtttaacgatacgcaccgcgatattaaatcgccttctttctggccaaggaactctggcggccgagtccggtctaaggcttaatttgtctacattaaaacgagaaaacccggatcgcctttaaggtaaggcgtccgggtttatttcgatctagtgtccgctagaatcagtggctcgcgccccatccgtccagccagcagtcgaagacggcatggcgcggcttatccttggcaccatgggagaagtgcttgaatcggattacctggccggcgagaaattccctgtcgttccaacggcgctgcttttcgtcgtgagtgaggctggatgcggaaacattgaaagtcactccaggccacagaccctcgttgcggcagacgaacgcgccaaccatgcctgatggagccagattttccgaatggcttgagcgggccgttcgacctagctcattcgtgaatgcttcattgttattatgcatcagctcttcgacgtcaacaatctctgcttcatcatagtcatatctcttgactttgacgcagtacccttccttggccgtcgagcgcccgaacttgtaagttccatcgacgcgctttcccatggagccttcgaatccaagtcctgtgtggcgacgttcgacttcgctgaactgttcgatggaggtgaccagttcctgctcgactaggtgaatcctctcatagccgatgcagttcttcagaaagctgacgcgctcggcagctctggccagtcgctcttcggtcggcgcgcgcggatcggtgaaatcgtcaaacacgtggaaagaccaatccggttcaccgtcgcgacggcgaaggtcgccggacgacttctggaatactttcgggtctctgatgtcgccgcagaccagttcgccatccaggccatcgaacattgcatcgctgagatattcacggatggactggttggtctgcggctttaggcttcgcgtcaaggcttcgccttcaaatatgaaacagcgaaaaccatcgatcttcggagaaaagtacatcggcaactggccgtccagaagttccgggtcatagttcgatgcgagcatgggtttcatacagtactccagaaagaagcccggcgaaccgggctgaatggcggtaagccggatcagatggtttcgttggcgtgattcagctcggccatgatcgatgcatagcgctcatccgactccttgatgaacacgccgttgtacattacgcccttgcgatccttgatggtgtcgtaggccgcctggtagcattcgagcatgctggtgtcgtgctcttctgccgcgtcgaacagggatgcgactgccatgaccaagctcttgatggcaagccactgatttccgcgagccagcgagccggccaggtcgccgagtaatttcagatcttcgccgtaggacgggcggcgctcgaccgccaagacgaaggctgacatatggtcgaacagattttcgccgagctgcgcggccatgatggtggccacgaccatgacatcgccgatgccgtctttcacttcggcggtgtcattctggatgtaggcttcgcaaacttctgcgaattcttctaccagcttgagaaactgatctttggccgaagagcctttgatcaggttacggtcggcaccccattttaccaccaggtcatggagttcgctattcatgattcgttcgatgatcattctttcgatgccttctgtatttgggatttgactgcgttgatgatggacgccgtgctctggcgcgatccgtccttagtggtgccgaagtaaaaggccataacagacttcagttcggcaaaccaatagccgatgatagtgccgatggcgacagaggaagtcgggtccatcagcgcctcgcggccgaatgtgaaaattgcgatgatgatgagaatggaaccggtcagaagagcgaaggttatcgccgggcgaacgaagtcattttgttgcgcggcaagccttctcgccgaatctctgtctgccgcctcggcggcgaactggctgagttcggcctggagctggttctgctcagactgaagacggttttgttcggcctggatggccagttcctggagacgaacacgctcggcgctctggagttctgcgaggcgcgctagagcctccggattcgcgtctagagcgctcgcgaccgatgctgggtcggccttcgaccctagagccgtcgcgacgatagcgccaacggcggcgcctgcaggcccacccaggagcgaccccagggccggggcagcagcgccgatcttactacctatgtccttccagtccattttcgattcctcaaaagaaaggcgccattacagcgcctttctctggctgttgacgttagaactcttcggcttcggtagcgccgccaacgccgccggtgtcgccgcgaggctgttcctgcttgctgtagtccaccttcacttcgccgccgacgaacgacttgtacagatcggccgcagccttgaagtgatccgggtttttcaccaggccttccagttcgaactggacgccggaccagctgcccttgtcgttcgacagaccgacggtggtcatgcggaccaggttggcgaaagtcggcggggtgcgcaggccctgcggagtctggactttcttctgggacagcgcggtcatgagcttcttcgaggccttgatctgcgaagacgacagggagatcagggcctggccgaaatcgccggtttccggatcgatgacgatgacgtaatggccacgggtgtcggcgaagtaatcagatttcttgtcgcttaccgaaccgtcttcgttcggcgcgtacagtcgcccttctacttccttcaccttggtcgggtctttcatcatttccttgaagtcttcgacgctgatggaccctttgaaaccgccttcggcatcgcggccggcccagcgaatgaactcgcgacgatacgcggccgggatgatcagcagaccggttttgccgtcgtaaatcttgccggtgacggtattcaggaacatgccggccttcgcgccctcgatgtatttcgggtcgtcttcatcgacctgcggcgacatcttttgcagcacttggatgaagggaatggcataggaatctgcgtcagccccttcgaaaccagcgccgtcatacgcgcccaggtccatgaagtcgggaacgtcagtagtcgcgacggcgccgccgttggccactgcaacggccttggtttcttcggttgcttcggaagtctcggttttcttgccagccatgttaggctccttgtttgtcgaatttcagttatcgctaactgtgggtttataataacggaagttgcagcgaagtaaagcaaattacatgttaagatttgctctttttcaccttcggcttcgtgatcttggcctctttatattcgtggacgccgatgaaatctggcaactcttcgcccttctccaggtactcgcgaccgaacgcctggagggtctggtagtgaacatcgcggttgatggtggcgtcatagccggcttcgatgatcgcttcggccgccttcttcgcatcttccatttctccgcgaccgaattctgccagaactttggtcttgatgatgccgtcgttgtcggtatcttccagccacttccagaacttcgttttgttctcttccttgacggaaatgatggccttcggctcgactttgaccgtgcgaccgtccgccagagtagtggtcttttgaccaagctcctccaacagctcaggaatggtgttacgcttgagggttttcagctcctcttccttttcagccagcgccttttgaagatcgaggatttcgccgtccagctgcgaagccttgtctaccaggttcagcagtcgatggccgatgtcggtggcctcaaccgccatctcatccatgacgccaaaatagtcgatttcgcccggtgcgttctctttcaagtattccgggatttcaagctcttgctctttcatgtccgcctccaacttagtgatgttcccttacttgaactaagtattgagtagatattatgccgcatcttccttgatacggctactgatttacatattaaatttcgtcgcgagtgctaacgtcagcctcaaacacgccatcgacgacataacttgccaggttgcgcttccactccaggctgacctggattttctcgtcgatggaatccagacatatcaggtcgaagtacaaaaccgagttgacggtgccgattcggtgatttcggtcttcggactgcatccgcagctcgttgtcttcgtcggtagtgtagtagatggccacgtctgcggcggtgagcgtgatcccgatccctgctgcggccgggtttcccaagaacacctggacgcgcttggcctggaaatcgtcgatcaatttttctcgctcggcctctttggtctcgccataataggtgccaaacgaaatcccttggacctccagatacgccttgatctggtcgatttcctgaatgcgcatggcccagatgatgatggaacgctccgggtcttcctccagcagaccctccagaagatcagtaaacacggcgaatcgcgggttgtcttcgggcggcaggatcaccggctcaccatagacgttgatatagccggacgcaacttgcttgagcttcgaacgcgctgccgcagcatcgaaagatacatcaagcatgaaatcttcgttcttgagaacaaaatggtagtcttcttcaacgcgctggtaaacttttcgttgctccggcgacatttcgaagtatatgcgcttgtacaccttgtccggcaggaatggaagtgcttccttcttcgtgacccggaaactgtgcggctcgatcaaggaccgcagcttgtccaggttccggaacaccgggcgcccacactcgtctttttcgaccagttgcggcggcgtcgtctgcttcccttccagcttgcgcatgatagcgatcattcgaggatcgtcactgggaaccaaaacggaaaattcggccacgaacgcccgataggatttcgttccaagaattccatcgcgcaagaattggaactgcatgaacaaatcggtaggcgcccgcgttagaggagttccggaaaggatgcgacgggccacggccttctcacccagctttacgatctttttcgcacgcttggcttgcgggtttttgatcctcgtggactcgtcaacaattgcgcaaaccttgaaagtttcaaggaatcgcaagacttcatcatagccagcctggtgattgatggcgtcaacgttgatggcgaagacgcgaagaactttttcatctgcgaacgtctcggaatacagacggtccaagcgcgccctggcctttttggaagtcggtcggccgcgccaatccacgctcaaagtcttgatcgcgacgtgggtgggaatctcgcgcagaatccagttggtgtggacgcctttgggggcgacgatgagcagcgcgtccacgcgcccctgtaggaagaggcgaacggcatcggccaaagtcgtccaagtcttcccggtgccctgctccatcaggtatgcgaagttccgtttgttcagggacgctgccagggcattgaactggtgctgcatggcctcggtcttcatgcccttgacggggtatgttttggctttcatttgttctccagatcagcgaggaactggacgatgttgtccagtccttccgcataactcgcgacttccaccaggtcgcggctgttaagatcgaacagatcgagcatgggattcaggagcagccaatcggttccgatctttgccaggacgaagccccggccgccccagccgatccgttcccgaaggaaagggatttgcccaggctcgaaacatctggccattgggcaggtggaggcgcgtttcggccactcctccaacgccttgaactcgacccagaactggacacctcgacgattcaggcaaatcgaatcggacataccagaccgccgcgtctccagaaagtcgatcaggattcggccgagtgagcgttgcttaaacgcattcgccgctttcgtttcgcgatcattcatcgccattcccctcttcggaatctttctctgcttgcgctgccaactttgctttctcgcgttcggtcaatatccgcttgacggccttcacgatgaacatatcgattccgctgagcttccatcctttgatgaggaaccaagagccggtcggcgtaccttcggcgatattcttaccgtactgaagatatttttcagggcgaatcctgaaacgaatcggttggtcaaccgagtcatccacgcacatcaaatcgaggaactgcgactggcctttgtacaccggattctttccttggtcagccctcttcttctggcggatcggttcattctcatccgacagaactttctttaccagcttgacgataactaggccatcgtcgccatcgcggatatcacgaatgttctgaatgggatttccggaagtcaccccaaccaactcaggattgtcataggcatgaccccagagcgtatgagattcattcaaatccgcgaattgaacctcagaatttgacaaactcgcggcaactttctcccaatcctgaagcgttttaagatgggagccggccagctctttatattgcgccttcaactccttcagttcagctttcaactccttgagatcagctttgagtagcttctccagttctttgtctctgcttactttcgccgaaagaatctgggcttccagcgcggcaacgtcatcggccttatcctctacatcctgcgccgaaatcgggcaattggccagggcgatcctcgcggccttgacttcctcgcgaagacgcaagaatcgctcggccttagccgggccgaagcctttggcgttcatgatgccgccgatcaggcgtccgtccgctacaacccagttgagttcggaatgctccgggtccagggccgtatattctacgccttctttggccaattcgcgaaggatggacacagtttgctggtcgtctttcgccgcccgaagacacgcggccgcgtattccaggcgatgatatcgcttcatgtagcaggtccagtacgtcaccacagcgtagctgaccgagtgggagcggttgaatccccaggcgccgaacgttaccatttcctgccaaacacggtgagcatcgtccggggcgacgcctatggtcttggcgccctcgatgaacaattcccggcgcttgttgaaaaattcttcgccctttcgcgcagacatggctttccgaatcgccgacgtttgttcccagtcgaactgcccaatgtccttcacaatggacatgatctgttcttggtacaggaaaactccatatgttccagacagatactgctcgacctgcgggatggtataggtcacaggctcgcgaccggccacgcgctcgatatacttggttgccataccagaagacaacggacccggacgggcgagcgccgtgatgtggtcgatgttctcgaacgcggtgatgttgatcgcgtttgctaccgagcgaacggcctgcccttcgaactggaagatgccggacatcttgtcttcgttgagaatgtccagaaccgccttgtcgttcaacggcaagtcgtacagctcttgtgccgtcacgcaattagcatcttggatgacgcccagagttcgaagcccgagcgcatcgatcttgagaagattcagatattctgaatcgggcttgtcgagctgcgcgacaccttcagaagttaccgtgcagaagtcgatcacttcatcgttgcagaccaggatgcctgccgcgtggacgccggagtgggatgggtggatttcgaggtcgcccatgcaggcggacgcaatctcatacttttcacggaagtcgcggccgggctgagttttttcgaaagtatcctccaatccttttccatatcgttcgtccgccgatgtatattcgatgatcgagtttttgatgttgtcggtgtcgtggaatggaatgccgaagcgttttccgacgtgagcgataaccgacgcggccttgagtgtgttgatgttcccaagctttaccacgttccaagtgccgtatttctgctggagatattcgaacactaaatagcgatgggtatcggcaaagtcgatatctatatcgggaagatcggaacgggaaatgtcgataaagcgctggaagaggaggcgatgcgggagcgggtcaacctctgtgattccaaggagatagcagaccaaagagccggcagaagagccgcgagctggaccgaccagcatgtgcttcttggcaaacgcgaccaaatctgccacgaccaggaagtagctgtcgaaatctttcagctgaatctgcttgatctcttcttggaatcgatcctcatactcctgggtccattccttgatgtggccgcgactgaggcggtaggcttgcccctcgcgagccagagcgacgatatcaccatccagatggatcatcggcgccttcgccagtttcacatccgccaactgctcgactaccgcacgagtattggcgatggcggaatcgaactcttcgcgagtcatgatgtggcgtaaacggctccacagctcctcttcggtggcgatgtggcgaaggccgaccgattcccgcaccttccaggccgacgcgaaatcagcatggtcgatggacggcatgtcgttgtaagaggtaattaccaccggctttccgaatgccctggccgtctccatagcgccgtgcgcggcgaccatcgacgcgggattgatgtcaatgtagtcgattccggccagatccagatgggcataggcctcgccagcgaatttgatgacgccgtcagcttcctggaattcttgcggagtcaatccttgattctggaccgacttggaagtcaagcggtagaacttcttggtgtccttggcgagcacccaggctttgagcttcagctctttctcgccatcgtcggcgcatttgatcgggatttccatgccgaatccgcgaggcagttctgccttggtagcggcttgttcccaacggacgtggccccatgttccatcatcgacgatggcgacgaatggggattcgatctctttggcgcgctcgatgatctccgggaatcgaccatatgcggcgccgtaggagtaaccagagcgaacgcggagctgagggaaagacatcatgcggcctccattgcttgatacgcccgatacactcccatgcgcttgcagacttcgtggagcagccgcacgtcgtcgagcgcccggtgtttctgtacatatgggccgcagtagtgctcataaagatgttgcaaccgcatgcggtggccgaacaacggcgccgactcttccacagtacagatatcgagtgatgggaaattgacttcttccaggccgagctttccgcgagccaaatcgcaggtaagcatgaacttatcgaatggcaggttgtgggcaatattcgcgtcggctctggaaaagaagtcgcgaactttctggcgctgatcgaggaaagatgggtgcttgaccaggtcttcgttcttcaacccggtgatcttggtgatgatttcctcgataacgattccaggattgcagatgaactctacttcatccaaaatcttttcgccatcagttatcacgccggcgaattcgatgattctcggctgctttctcagactcaccctttggtggaacgggagccctgtggtctcagtatcccatacagcgaatatcatgtttgttccctcttatgtcgaaaggccggctgctttcgcgaccggcctgaggagtataccgcgacggctgaagatttacgccttctgtccgtctttcggcgtgatgcggccggagcgcatggtggcgtgaacaaacgccgaatagttgatcgagtccaaggccgaatcggcatccttgaacccgctattcgccaggcgagtgagtttacccaccatgtgcatcacgaacagggcgagtcgatgatcatcggcggtcttcgccaccaggccgttcgggaagaggatttccatgatctttccgtacatcagatcattgcgaccataggtgctctggcgggcgcggaagacttctgctgctgcgtacagattgttgagaacatcttccgcgaaatcatctggatgggaatcatcttcgcccggccagacggattccatggcgaacggcgcggcgtcttcggtcgggtcttcggactgagccgtttcagcgagcggagacggggctttcgcaaacgcctcgtcgagggtaggggcggagttcggggcggccgggaacggctcgcctgccatgtcgttgggcgcgctatcggggtcgctatcggccgcgacggcgaagaacggcgcatcgcaaccttccaggttcaggatgtaggagtcgatccccaggctattgtaggcatcgatgatgtcctggcgatcatcgaacgccgcgacgatcttggtgacgccttcgattttcttcaggatgtcgagcacgactgcccgcttgaactgaggcgccggctcggtgttaccatacggccgcatgatgagttcatactcgcgatgttcggcgatgccgagttcgcggtggagcttggccctggtctggaaaaagtggttgtcggttcggccggtgacgaagaaaatcatgaggtcagcgtcgatagcatttctgatgcgacctacagcatgcgggttgagagcgtctttgtcgagacgagaatgatactcgtcccactgccgttccaaggcgaagctcttgcggtggctatcgtcaaatacgcagccgtccagatcgaagatgatgatgccattcttgggtttgcgttccatattcagatttccttgatggttgctttctgggtgactgttttatcgatgaacgtcccatcagaagtgaggcggaaaacttcgccattctggatgaaatcgaacgattgcacgttcatcgtgatgcgaatggattcgctgccgttggtcacttcgacttgtgcgatgtcgccaactttctcgacaatgatcttcatgttacatggacttcccattgacggccacagggttggcctcttgtttttccgatccccagaaatcgcggcgcagttcttcctgctcggccgagcgatccatccaggggcgatagaacttgcactggtagataggttccaaaggaacatcaatcacaggaatctgacctggctttgtctccagagcggccatgaaccggtcataggatttctgctggatttcctcttcattcaccactttcgacccatagcgcgggaaggcgcaggagccggtggcgacgcagtgcggctggagcaggctgtcgaacataggatagacttccagaactagccggcgcatttcgcggaatacttcctgatattcaccctgggtccgaacgcacaggcgaaccttcgccatgtcactgagagtccgcagattgaacttggccgcgatcttcgtttccatgttggaaggaatgatggcacgagcatcctggagcgatgcgccggcctccaagagcttctggtaactggtctgcgcgtcggcgatggcatcgtgccacaggcggttcaactcttcgcgggcgtgataggtcgggtccggctcgccattggccgtagcctgctcatcgaaatcccagcggaatgcttccggctgaacaacggcgctaacctccagggcgcgactggtttcctgctggtaagcaccggtccgcgtccggacgagttggtgggtgaaattcttgcttacgccctcgatctggaaaatgaagtccacgaattcgaacggcgagcgaatggtgtccagcatgtacttccagtggtcgagcttttcggcttcggtcatggtcgccgggtcttggccgcgcatgcgggtggatttcgtccccaggaggagttcccaggcgttctgggtgtaactgatcagagaaattttcatcaggaatcttccggaattggcgtgaaagtgaatttctccaccagcgccatagccaacgcttgtgcgtcttccttatgcagaccgtatctgtcgatttcttcggccagcaatctgcacgcctccagacggtcttcatactcttctgcttcgcacattgacgaaaagatagtgccgtcagaggtccggtacaccagctcaatggacatcacttcaatcctcagtagcagcggatgatttcggcgcgaatatcgcgacggtccaggtaatgctcaataatcttgtcgcgggcgcgctcggcctcttcgcggctaccgaacgacaggttgaatgaagtgaaaggcttatcatccaggcgtccatcgccaatcaggtacaggatgcctaccagcacgaaagacggcgaggtcttctgctgcgggtcgatttgcatttcgaggaaagacataggaacctcttcaggttggtctggtgcgtacattaatagcgctcctgctgagcggccactgtttccggttcgtagatgatcatatcaacgatttccgggcactggcttttcacccagtcgagggccgcaaccagcgttgtggcggcgccgaaggtgaaagtgcgataagactcatggatgtacggcgaacccatggagtcgcgctcggtcgtgcgagaaatgactactttgatgttaacaatccggcccatcttcggcctccactttagcgatgatatcggacaggctcagcttctcgccattcaggaaataactggcgcgaaacttcctgtcgccttctggcccgacgatccgggctgttattgtgagactccctccgccaagggcatccgtgtccctgaagaaagccagcagcgcccgcttgagcgctgcctcgcgaggatcgacttccattaacctaccacgttccagccgtgctgggcgcaccataccgcgccagttcccgcaggaagactgttaagaaggaatacaggggtcaggcggccatcctcggtcatgtggatgaagtagcgtgcactttcaccgagccattcggccttggcgatggcgcgttcgaggttgaccttggtggcgtaggtcttggtgatgtttttgtcggtggagaaggttacttcgcgggccattttgtcgattccttttggttgaagggtttcgcgtttcgatgagggaatactactctcacctggctcagaagtaaagcactttgtgtaaattatttcacgaacatcttcttggccttctgataagacgaagaagtcatcaggcgctcgatgacgtccatgtccgaaaccagatcgtccagaaggacgtttcgccaggtcgcgaaccgaccgagcgagaagatgccggcttcatgggtgagattccagatcatggattcgcgctcgtcgcgaccgagcggaatgattttacccttggtctggacggtcggctcgccgtccggaatgagattattcttcctgatgccgaaggccgagcaaacttcctccaggtcccagttgctgtcccattcgatggtttcgatttcaccatctacagtctccacgacgcccttagtaacggattcgacgataagggtgtcgccggtgatggacgctcgaaacgttcccacttcgggaccagggaaatacaccgtctggaagacatcgcaaggaatggaaagcttgtatcgactcacgacgatggaggttccttcgccgaatgacgggtcgatccccaggtccagtcctgccgcagccagattggcgcggaatggcgccgtgctgatgatattgacgtggtcatcttgccggcgaaggaactggaagaaagaggcgtcgaaaggcctgccccagctgatgcgattcgccagcttagcgaccagctgctcatagtagtcggccggcgcgatccagcgcttttcggtcgccatgttccagatggaccgatccgacaggccgcccgttactttcctggagtacatgttgcaatagtcgatgcgcggctgggaaacgaactcgccgtcaatgtagatggccttgtgtacggtgacttcgcggaatgggatgccggtgagttggccgatgactggtgagcggaaccgcaagagcgcgttgtggcgttccttgctcgtcggcgtcgccgcgtcgatgatttgggcttgaggaaaacgatgcgcggcgatcaggccggcgagtccggctcccacgatgataactttatgatcagggatcatgatatgttccttatgagtgtacagaacttgagaggataaaaaagggacccattttcatgagtcccttgaagagctagacgattcggtctcagaagagcggcggcttactcttcttcaccatcggaaccgtcggcgccctgaccttcaccgtcgtgctcctggccttcatcggccttctcgtcatcgccctggccagcttcgtcttccttcgaagcgatggcaaccagatcgacccagcccatgatttccagcttgctcagatagctgcgaaccgaggttccgtacagcaggtgagccaccttctcgccgaaggattcgatttcgaccggctcaccaacggtgcagtgctcgttgatgtaagcgaacaccttgccgcgagtcgagaaggcctgcggggttccatggccgtcgccggtcgggatgaagtgggtggcgcgcggacggcgcgaaccattggacttcaggtcttcgcggcgggcttcggccttcgcgcggcgctcttcctgctcttccttgcgacgcttcttctcggcctcgcgctctgccttcttctcttcggccaggcgcttgcgctcttcttcgcgtgcggctttctgggcttcctgcgcggctttcttctcttcggccttcctggcgcgctcggcttccttctcggccttcttctgctcgcgctcggcttccttcgccttcgccttctcggcctgctcggcttccttggccttggccttctcagcgcgctcggcttccttggcggcggccttttccttcgccttctcggcgcgctcggcttccttcttctcgcgctcggccttgcgcttctcttcgcgctcggctttcttctgctcggcttccttggccttggcttcggccttctcggcgcgctcgcgctctttacgttgacgctcagcggccttctcggccttgcgcagggcggctgcttgttccttggtcagctcttcgccttgggtctgttcgttctggtctttctgttccatgttcttactccgggaatgttttaaagggatggcttattggcctgtgaggggattatctctaaactaactgaataagggaatacccttagcctgaactttcctaaatattttctttcgggaaagtccaaactctagggaacttatttatgttcgagaagttactagcttttacgcaagaacagcaagtattcaattgcgcgagttatcccagtatacatcaactgactataagggatggacggcaagttttcttctaacatggcgacccgtttccattctgacccctgcgacttgtggaatgtcatcgcccagccgaagtcgaatccaccaatggccttctgcgcctccagccgcacgtcttcctcggccgaaaagctcagagggttgaacttcacccagcgctcatagttcgtgccgataatgcgaactttggcgaacaacatctcatcaggctcgtcgtcatcttcttgcccttcaggaactggcttgaagtccagcagaatggcttgttcgccgttcataattccatattcgtgctggttcccagtgcataccagcttctcaccgattcctggctgcacgcctttgtagccgaggattcgccgagcgcgcgcattcaagcgacgacgagtattgttgtaagcgcaaagaatcacaccatcgttgtccaggaacgtccgcatttcatcatccgacatatcgaagccggcccggaccactatgtcatcatactcgcggcatggcaaacgcttgccctggcgaacaaacatcgacgcccgaacgatattgccggcgttgcgctcgatttcggtcatgatggtatcacaactgttctcgtggaaaatctggacgcctcgtacaggaggaacttggccaaagtcgccaatctccaggaccggaattcggtgcgacaacaggcgctcttcatcccactcgccgatcatggacgactcgtcgagaactaccaacttcggtttctcgtcgagcgagtctttgttggcaaacatgatttcgccgtcttcatcttcaccaatcggtcgatagataaagctgtgaagagtccgggcattgacgcaacctttctcacgaagccgagcggcagcctttccggtcggcgcgatgaagactgtccagtccatcgagcagcaaagttcggcgatgatcttcgcaatggaagtcttcccagttcctgcaaaaccggcgagtcgatagacctggcggcggtgcgctcgatcacaccaaccgcgataccagttaacgacggaattaatcgcgtcgatctgctggctattaggtcggaagccgaatcgctcttcgatctgatcgacggtgaagttagatgctgacatatttgcgttctccaacgctaggtttaattgaattgagactcagtttaagcagaccgtccacagaccacccagtatcacgacgatatttgcggccgtgcggatcgacatagaagtttttcgtgcgccgcaacaggacatagtgccaagcagcgccgagcgcatggacccttcctttataagggaaggccttaagttgctctgcggccttcttcgccccagggagccagcggacggtcgaaaggaccaagaccgcacccttgacagcctgggaagcggcgcggccgtcctgtgggctatagcgatgtctatcggggtctacccagtggtggttgccacgccggagcttcaccgtccgggaccggccctcaaacaccacagtaccttcgtgagtaaaaatgtgttccgccatggaatgttccttataacgtacagttctgctttacctctgcgcaagaagagtatactatcagctgactcgtcaaagcgagctaatttaatccgactttacttcggcaggaaagtggccgatactagcgccgccgcctgtactgccctccaaaacagaggatacattaaatgcaagaatgcaagatttcccgcgaccaactcccggtcggcaatccgaatcccaatgtcgataagactcgcgacccgaacctaaagcccggctacctgcgtcgcagccgcgagctggacccggcgctggccgttcgcatccgtcgcgagctgatccacgccgaagcatccgacttggccaaggccggatgggtcaattcacagtccagcctttatggatcgaaagccttcccgcgccattccgtcgttcgcgtgaccggagttccggaagatggagctttcatcggcatgctgatcggcttcatcgagcatcgcgagcatggcgaatgggcggtcatggaagccggaacgaaagaaggcggcgccgtcattattccagtcgatcacatcatgcgagcgtcattcgccgaagccgaagagttcgccgaaaagtgggagcggaacttggggtggcgtctcctgcgccaactccgcgagtgcggcgccctggccgggactgaagacgagttcctgcggcggatcatcaatcgatacgttcgtgatcgcacgatcctcgatcaccacaaagtcggcgcggacaaaacctatactgatgcagtactcaaaagcatcggcgaaacatggccgaagattccttcggggaaattcgtcggacaccgagtcgcgcagctcctgatcggccacaagctaggtcgagcggggaccatcctgaatgacctggtggacttcctggagaagttcgcggccgggcgcgataaagttctcaacatcgccatctgtaattgaggttagtgatatgccagatttgatgaagctgagtcataggcaagttgaagctctgctagggctgtctaggaattcttacaattggattcacggtccttcgactgattcaaccttgaaggctctgagacgaatgggactcgtaaatttgtcctgggatgattctgtagctggatacatgttcggcagtcagccttgttggagcataactgacgccgggagaaaaacgaatcctggcaatacagggaactctgacagaagagcctgaacagcaatttaatcccagcccaggtcgccatgagccaggtaagtacgattctgatcgacttgctgagcaactagaaaccatagctcgtctggaaaaggaacttgaagaatcggaaaagcgcgggagcgaactggccgcgagctattgcgacggcgtggtcggcgatgaatacggccacacttactgccgttataaggcggaacgcgatgccgctctggccgaagtcgagcgcctgcgcgaggaaaacgccaatctaatcctcgcgtgcgcatcgctggatagtgagaagcgcgagatacagcacaagtgggatgcaatcagcgccatgcgcggcgacgctctggccagggtcgcggagcttgagatgaaactggacaaggccgactacgcctatgacaacgaccgcatccacatgcgcggcctggcagcgcttgccgttgcgcgcgccaaggtcttcgatgacggcagcgatggggccgatgccgagagtgcccgcagcgtggtcgccatcctccgcgaattactagccgtcgggggcgcctcggctcagcacagcgcgccggatggttatgccatgatcccggttcgggagactgaggcgatgcacgatgccgtaatggcgctgctgtacaacggtgtagcccgcaccgatacacaaaagctgctggatgcgtacatcaacgccgcgactaacaaggagtccgtgtaatggaaccgaagaaaccttcaccagtagatggagtcatcatgaccagcctcgacgttctcaggaaggcaaagcctgaagcgcaggacgagtgcgccgtgtccatgttcgcaacggcgatccgccagaaactgcagcgctcccgcgataaaggccgaggcggctggatcgactgcgacgaagatattctgatcaacggattcgccgaacatgcgctgaagggtaatgagaacaacctcctggacctggcgacgttcctcatgttcatgtgggtgcgcggcatcgatgacgcaaagattcccccggcgctcgaaaaggcgagacagcacaagatcatggaagcctggagtcgaatccatgaagatggcctaaaatccgccagaaaggcgagtgctgcgcgacagttcgtggaagtgccgcgacgcaaggggcgcccggagcgacttgcatgaagcctcacgaaataagactggcccaggccgaagagttcctgcgcgaactcggccgagggattccggacgacgaacgggtgatggtcggctacgcggaagaggccacagtccagaccgatgagaacggccgcaagctcaacgccggctggtggcctgtgccatggaaggaagggaaatacataaactcccgatccaacgcctacgcatgtatctcgtcgtcaatcaagacgccgaacccgaagaccggccagatgcgatactggcgcggcgaagcctctttcggccacggcctggcgttgatggtcgatgacatcggctccggcaaagggtccaaaggcgacttcgaccgcgacgaattccgcgagcgactggagccgaccgcgattgtggagacttcgccgaacaactaccagttctggtatttcttcaaagagcctatgtcacacatgctccagttcaaggcgctgctctattcgttcgtggaccaggtgctaaagaaaggcggcgacaacaccgtcaaggacgtcagccgttacggccggatgcccttcggcttcaacaacaagcgcgggaaagacggcaagttcaaatatgccgacgaaaacggcaaacccgaactcgtgcgcctgtacagcgccgactattccaagcgctactcgccagaggaaatcgcgcaggcattcggcgtccgcatcatcatgccccagatgaagaaggtggagataaaccgcgacgattgggtgtatgaccaagtatggctgaagtatgccgagcacatctgcacgaaatacaagatgggcgaagcagcaggcggccaggtccaacagaacatgtccggcaaataccgcatccgctgcccctggggcgacgagcacaccaacggcgatcctttcggtgcatactttcgcggaccgatccctggagccgagcacgaatatgtgttcggttgcgggcacgatacttgccgcaaagagcatcgccggacttgggcggccttcacggatgaagtcgtgctaccctatatcgtcgaacaattggaaagaatcaaccgccgtcatatcggtgaggagtagacaatatgcaaaacgatcctggaatcctgattaccgccatcggcttgctgttcctcggccttatcatcttcttcgaaggcctaaagggatggaaaatacaagtcgcaaacttcctcgcgtcgcttctgtgcttcttcttcggcctttctgctttgacgttctggttcgtcgttgcgtttgacgtattttaatcgacgaacggtacagaaattttcggatggggacggaacttattagctatgccggtttaggtaggagataatagccgtccctttcgcctcaatatgtagaggcagtgttatatccgatcatgtaaagcagaaggcggcaaacctaacatgattatcgacgacgataacattcttgatgatgacgaatcggggtccagtgagttcgatctcacacaaatagaagatgctggaatggaccctttgatgaccgccgcgagcaaggcggccgatgatgcgattgcgaggaatgagacgtaccgagcacaaaaggcggcaaagtatgccgaggcgtatgcggaaccagatctgaagaagcgagcgcgattgttgatgctcgaccaggcgttcgatcttccggtcagccgggtggtgaaagggccgttcgatgacttcatcacgaaatacagctcgacgtcagacagcaactacctcgcggtctatgatacgttgttctgtaagggcgacggaaccgtcccacacccgcacttcgacgagtttcgcggccggctggtggaccaccgtggcgtggcgttcaacaacaagaccctcgaccctattgacctgatgggcgccctcgctgctgcggccttggacgatccatcgattaagaagacgattgagacttgctgcgtgtgggcgcgtcgatatcgccgcaactctttgatcgagacgtttgagaagaagataccggagtgggatggcgaagagcgaatcgaaacgctgctgatcgacttgttcaaaccgttcgacaccgagcttaaccggatggtgagcaagtatttctggctgagcctgtactgccgcatcaactatccgggaatttcggcgccgatctcgttggcgttgattggtgggcaagatgcgggtaaatcctatttcggcctgctgatctgcaaggagctgtcgggcggtcgcgatctggctccagtccaactcgacctgagccggcatgaccagacgccattcctgcgcaacatcaccggcaactcggttattgcgaacgtcggtgaaatgtccggcttcaaaaagggcgacatggaacgcatcaaagagttcctggtgcgatcttcggatacattcgaccagaagtttgagccgggcgagacgatcaagcgacaatggattaccatcatggacggcaacggctacgatggactccagcgggacgactctggtaaccgccgtttctatccgatgttcgtggcgcaactgcccgatgaggatggaaagccgaactgggtaaagccaggcgatggcaacgaaccgttcaaggtggacttcaccgacttcggccgcaaattctggcaagcgatggccgagtgccgcgcctggatcgaagagcatggcgtcgatggctacctgaatatggtgtcggaagcaaaccgcgaagtccagaacttctctatttcggaaatggagaatgcgcgtggcgtggttcgcgacgatacgattgatatgtatctgatcaatgtcctgatcagttgcgagtttgaagagattaagcctggtgggaattccaagactcctgggtggagggcagacacagtttccattctgaagtggttcgatattctcgccaggaagaagccgatttctcgccatttaactccgcacctgaaagcactggggttcattccgaataagaacggcctgaatggatggctcctgcctgtggataaggtcgctcctggctggtcgaagaatatgcagacgacgctgccaccattcaatgatgcgctggtgtatctgctgagaaagggcgatccggatatgaccgatgaggctgccatggcaaaaattcgagcagtacgggcagagcgagccaagatgttgggcgaggatttctgatgggttggtgaattgtggttggactaggccgccttcgggcggtcttttctttggtgcggagaacattaatttagctcgtgaacaggtgaggtttgaaagctatgtgggaattagggttgggtgaaggcgttgtattatgggaagttgatagattttcggtattggtctggcgtgtatgatggttggattttgtgtgaaatgttgagaaattatgggtttgaggtggattttttgtgggaaatagccgcaaattcctggatagcgattctgactgggaagatgggaggcctactgccgcgtgggttagcggccaaattccctaattcccggtttttcgagcatggtttaaaactattctacagcgaaaatcgattgcgcaatcctaatagaaaaaatctatcacggacgttacctatctttaaaattaataaaattaatgggaatttggtaatttggaatagtttagtctttgaaagcctcgcggcactaagcctgtacactacccggcaagtttccgattccgctcaactcgcggcagggtcgccgaaaacttccgtccttccaaaccatgggcagcggcaacaccacggcggactaagcggcaaggtccaaaaccggacgagcggaaccggaaatttggccacagggcagaatcgctcatctggacatattcttaacattcgatttaacattcaatccaaacactcaccgccaccatcacccgccaccagccaatccgatcctcacccaccagcacaccgcccatataacatcctataacaccacctaacactcattcaccatcaaacccacccatacctaccggccacccacaagcagcccatagacgtgctccctggccccatagtacaatcgcgccatactcagtgtcgcggcaaagcactaggtcccatcaacagccaggcaaccgcgacggtccaagaatcgaactccagggacgcagcaacaaatgaccgccaaatcctacagacccgacgatttagtcacgccacaagaattcgctgatccgcagttcgcggcgatcaaccagaagcgtttcgatctgtacatcgacctgcgcgttcaaggctatagctcctggcgggtcttccgggcgatctggggcgaagagcacatggacgggccggcccaggctcgcatcttcgcgatggagtccaacccgtactatcgcaagcagttcaaagccaagctgaatgcgaccagaacgtccgatctgtggaatccaaagacggcgcttcacgaacttctccagatggttcgcgatcccaccgtcaaggactccagccgtctatcggccatcaaggaattgaacgttctggccgaaatcacgttcgttgacgagtctggtaaaaccagggtcggtcgcggattggcagacttctacgcatcggaagccgaggctcagaccgccaccgtcgctgctgcggccgaagccaatggctatgtacaggacggtaaagagggcgatttcccgtccccgacgccggaaccgaccgaggaagaccgcgccaaccccatttagacataaaataacatcgttctaggcctgaatcggaccgatctaaggcgacggtagcgggtaggggcgaaaaacgattctagggctgttctaggaagccgaccaataacgatcagaagcgacaaagccccggactctagttcagaatccggggctttctttttgggtttcttattctccagcttcgatgatttcgaagttgtatttgacgccttcgtgctcgaaagtcaatttgccggccgctttcagctgcatgcggaagcggatgtgcttcgaagagggcaggccgaactcgatgaatgctgcgttggtggaccggaactcaccgcgcttccctttgacggtcaccgccacgccatgacgctgggtgcgctttttggagacttccgggtctttccaggagttggcgatggctgcggacaggtctttggcctctttgaccttctctggcgcgttcttcgcctcttcgcgcatcttccggatttcttccagcgcttcctcttcggtaacctcttcctccggcttcagattttcttcttcggccttctcttcttccttcttcttggcagtgcgggttttgtaaaccttggccggggcttcctcttcctggaacgcttcttcctcggccggcagagcgttcaggatggcgaggcagcgacgctcggcggtcttgcgatcagagaagcgcttgacagtcgcatcggcgttgtgagcgttgtagaaggcgaccagttctttcatttctgcgttctggatgtcgccgaaggttttgatggagttggccattttgcgatcctctgttttggaagatttcgttcgggcttcagtttgtcgccccgttgaaagagattatgcctaggtcgatgctgcgtgtctacatttattttagcataatgacgacgaacccgacgaacggttgtcggatgtgaaaacaccgcaggataggctgcggtgtttggtggcgagggcgatggtcagaaagtcgggaccgtgatcggctcgatgggcggatcgccgggcctgtcgttgtccgatgcgggcgccgggttggacgggattgcgccggaccgaagcgccagagattccgactgtctgctcacctgcggagcaggaggagccggaggagccggaggagcttttggcgcagtaggggcaggcgcggcaggcgggaccggcaggcctggaggagccatcggcgccatgggcggttctggaagatcaggaagactcggcgctatgccgccaaaggaccgctgcgactgctgcgccggattgtcgccgaacatttcggcggatcggttgtccttgatgacttgacctatggccgtcttgtcgccgcccggctctgccggatcgaagcccgtgaatggagtggtaacgcagcgcatgttcggatgggtaggcagatttttcagaactatggaatctgcccagacatacggattcttgtggttgccgggtccgtggctaatgatctcggcaggaatatggccgttcatggtaagccattccgccatcccttgccgagtcagcgggcttaccacgatctggccagtagactcttcggcgacggcgaacagatcaccgagcttgaacccgatgattatgtagttggacctggactcgccgacgaaagccagagtttcgatgttgtgatggacatcttggtcttcccatatgtacagcacggtgtcactcctcaataaggttgcttggtgtgctcgaccagagacattccggccggaactttgaagcgtatgtactcgatcatcagcgcagtccggcgacgattcgttccggactcgtcattcacgaagagttcgcactggtgcggaatgactcgcgtcaccagagcttcgcctttcgagccgtagaacttgatgtaggctgcgatgcctcgcgtcatgttcagacggatcgtttcgcagagtcgctgcgcggccgacgcgctggacagatcggtcggactgaccgtcacccagtaatggccactttgacatcgacatgagttagtatttcgtcgccgacgagcaactcacaagccatcaatattttggccatcatacactcctatgagaaggcgcggccaggacgatcccagccgcgccgatggattaacgtttgtgaaggatggacactgcgtccacgtcgaggatgctgatggtacggcgacggcgcggattgctgcgttcatggatgcgaatcaggttcgcagctggagctttgtccaccacccatacatcttccggcttctgcttccggagcaggaccgtcacttctgcgttctgggcgaggccgttgcagatgaacgtgaacttggacgagggagttctgtacatgtcgagattcctttttggacttcgggtccggcttttcagtcggtgaagagattatgcctgatcatcaccgtcgagtaaagcacttatggaccaattctccagttaaatggaaccaaagcgcggtatcgctgatcgctacgcttccacgccatggcccttcttgctcacagacttcgaaccacaagctgatttccattctggccaggactcggccgaaggattcgagccggcaccggctggacaggatgtcgacattcacccgtcgattgatttcgtaccggcgaccgttgatgacgaagaccaggcgtagggtctgtccgtccagacattcccagtatctggtttcataccgaagccagtagcgcttaccagccgggcctaccatggtcattttaatcgatgctcctggacgcgccacgcggtccgttcggcgggacgggatcgaaccgccccaggatatagtcgggccggcgcgcttcctgaggacacacggcgagaaggcgccatcctgcgtccagggcgtactggagttcgtccgtgcagcagtcttccttgagcagcagacggttgacgctctggagattcggaccagggatggccgagctggtgtgcgagttccaaccttcgatgccgtccaccatctgtggttggttgatgtagccttcggacctgccagccaaccggctcgcggccagctccaggcgctccagcattggccgcagagcggcttccgggtcaacatcgtcccagagaaggaccaggctgatgatggtgtacggatagtcattgtccagatcccaggctgaagcggtcagacggcccaggccgatttcattacacaccacgggaa

SEQ ID NO: 14 - DNA, 66001 bp, Pbunavirus EPa15
  source 1..66001: mol_type = genomic DNA; note = EPa15
atgtacaaactcaatcctgcgctgcgagcggtctggcgaactcgcgcccgttacaaagtcatctatggaggccgggcgtcttcgaagtcgcacgacgctggcggtatagccgttttcctcgcggccaactacaggctcaagttcctctgtgctcgccagtttcagaaccgcatcagcgaatcggtctacacgttgatcaaggacaaaattgagaattcagagtacaacggcgagttcatcttcaccaagaactctatcaagcacaagaggaccgggtcagagttcctattctatgggatcgcccgtaacctgtcggaaatcaagtccaccgaaggcatcgacattctctggcttgaggaagctcactatttgacccaggagcaatgggaagtcatcgagccgaccatccggaaagagaactcagaaatctggatcatcttcaacccgaacgaagtgaccgacttcgtgtatcagaacttcgtggtcaagcccccgaaagattcctgcgtcaagatgatcaactggaacgaaaatccgttcctcagtgagacgatgcttaaagtcattcacgaagcctatgagcgcgaccgggagcaggccgagcacatttatggcgggattccgaagactggtggcgacaaatccgtcatcaacctcaagttcatcctcgcggccatcgacgcccacaagaaactcggctgggagccagccgggtcgaagcgcatcggcttcgacgttgcggacgacggcgaggatgcgaacgccacgactctcatgcacggcaacgtcatcatggaagtggacgaatgggacggcctggaagatgaactgctcaagtcgtccagtcgcgtatacaatctggcgaagataaaaggcgcctcggtcacttatgactccatcggcgtcggtgctcacgtcggttcgaagttcgccgagttgaacgatgccagccccgacttcaaacttatctatgatccattcaacgcgggcggcgctgtcgataagcctgatgatgtctacatgaagctgccgcacacgacgatcaagaacaaagaccacttcagcaacatcaaggcgcagaagtgggaagaagtcgcgacccgattcaggaagacttatgaagcggttgaacatggaaaggtttatccattcgacgaattgatttcgatcaactctgaaacgattcacccggacaaactaaatcaattgtgtattgaactttcgtcgccgcgcaaagacctggacatgaacggccgattcaaagtcgagtccaagaaggacatgcgcgagaaacgcaagatcaagtcgccgaacatcgctgactcggtgattatgtcggccattctgccgatccggaagcccaaaggcttcttcgatttctaaacacagaaaagcccggatcgctccgggcttcgggtcttactcggtatggttcctggcgctgagtgtcgatgcaacggcctcgccgactcccagggcttcctggccggccgcgagcgcttcggcttccgactcgacgatgaagtcatcaccttggccgtcgccgggcggaacctcgaccagcacggcttcttcgccttcgaaccgcaggtcataggtcttttcgacggacagaccgtaacgagcgttgagcgcgtcccagagctgggcctcataggtccgcaggtcttgcagagctttctggtggctgagcatggccatgtcaacagcccgttgcagggtttcgtccaggacgttgaatcgaatgcgaagagaacgaatccgctcgacgacttccgcatccactacatgtctttcgatcattgcttttcacctttgctgaatgtaacgttgtagccgttgtcggccaggtaggtcagggcgccttcgaaggaagttccgacgaggtgctttagcttcatttcgcgttgcgcggccagccagaatgcagttccggagaactcggcgcggccttcggccaagaccctgccatcaggcccggcgatccgtacatgcacggaagatagcttgatcggcatcagtgaatacctccactggcttgcgacggcatgctttcggcgcgtgcggcttcgcagtccgggcagggacatgcttggcggacgcgctccagctcgtcggcatccatgacatagagcttcccatcggcagtgtcgtgcgccatggcgatgttcgggaagtcggtggcgctcaggccggcgacagcgcggatttcgtcccaaagcaccagatgctcggcattcagtcgggcggcgagcgcttcgtgctctttagcgacgcgcgccatgaactcgtccatccggaatgcgaattccgcatcgatggcacgggccgaggccatggagctgagtcgaatcggttctttcttcatgatgattctcttttggttggtggttgctaatgtccatgcagattcaaggccggctcaacgcggcgaagaacaacacgatgaagaggagcgaaaagaatgcgaacgccagagatattccggaaatcagctttgccatgccctgcatctcagtcgccttggcagcgagtctggccttagcctcgataacttccggtcgtggcgactgaacatattctaaggcctcttcccgcgctttttcggcctcgaccaacctagggtcgcgggccgagacttcgctgtgccctggcctcgcgggatgggcttgcagcgatggagggagttcagccgccacgactccatagtctgcgcaggcccaagcgatcccgatgaggatcgcgaggatggattggacgattcgcagcatcactttgtcgctagggaagttcatgatcaatcctccaccgaccgaacgatttccatgttgcgcccggcattggtcccggcattgaaggcgcgccgaccgtcgctatcgtccagacgcatgagcttggtgacattcgactttttgtagccaggatcgccgaaatgttcgtgaaccgcagcttccttcaccacaaccagagacgttccggcagaagataccagctccatgcgcttcctggtgatggactgaaggcgatagctgatttcctgggtcgcggccagtttgaattgcgcggcaacctttacgttgaaacgttcgtacccttgcgccttctgatactcccgacacagacgatcaatggcctcgaccagggagttgaacatgttcaccgccagctcaacgtccgacttgtagcctttgaagcgtacggcatgaccccagcgcttggtagtgcttccgtcgcgggcgctcctggatgccttagccgatgctcgatggttgttgatgccaccggcgaaatccatgatgcagtcgttgtacgtcgccactgccactgagaaaaacttcatccagttcgggattgcggaatagtaacgagtcgcaatctgctcgtcgaactcttcgcgaatctcgccggtcgcttcgaagtcgtgaaggtcatatttgtccttcaacttcttcacgcgctcggctgcgatggccgcttcgtgcgggctggaagagtcggccgccatagcggtcagtttgcggatgcggtctttcgccttctcgatggcttccggggtgaattcgttctggtcggtcatggtcggctccttttgtctgaagggtttcgcgtttcaatggagctattctgccttcattcagaatggaagtaaagcactttcttccactatttcagcgtggactggagaacattccagatccaatcgcctgccaccagcaggaggctgaggatggcaaagaacaggacggcgaccgcgagctgtgcgccaggcttcagtttgggatggctgagcttgggttctgcgggaactgctggcgcgctggccctgcaaccgtcttctcccaggccgtagccgatgccgccctcacgcgtctggtgcgacaccagggatttaagatactcggtctgcttttgagactcttcgtagatgccggcgacggcgaaccagagggcgaacacgacggacgtacacacgacccaggcgccggtcagcaggagggccagcgggccgatgacgaagacggtagcagccaggacgattgcgccgccccagatgatgaagccggccagaccattggtgatgtcgatacagaactttttcatttgcgaattccttcggttacaggatggaggggatttggaactctgcgccgccgagcacatcggtgacgacttcccagagcgtcggcaccgaccactggtagcggtcgaagtcggtttcaggatcgacgcccagcgtcacataggaagtggcaggccatttatgaacactgcctttccgcatgagagtcgccacgcggccgtcaccgagcggattcgtcctgtgcggaacgtacgcagacatcgaatattgctgcccggcgtcgacaacaaatctttgcctctggcgcagacatacagagcccacaggattccagccgcgaccgccgcaagcctggcgagccgaagaatgctcataaccttcgtgagtcatttcgccgaggcaagccgagcgatcctcgtaatagttgatgttctccatcgatccaaccagcaccagagactcgaaatcgaatcgatgatcgtggatggccgagtgattgaagcaaagccgacgcggcagctccgggtgccaaacatggaggcgaccggccggaagttggacctgaatgaaccccaggccgtgcagagtgatcttgtccttcatcgggtcatggacggtgctcatggataatcctcagtagcagaaatgtattgtgagagttacgattgacaagccggtcgcccatagaagggcgaaccaggccatggctttgacggtcgtgtagatcatccgaagaattttccggcacagatcgggccaatgcccatttcgatggatgcgtggttggtcaactcgcgaccgcagcaggagcactgaccagtcttccgaccgtaggcgactgccgattccatcggcttttcgaacatcttcagaacgtcgtcgtgctcagtatcggtgcagtcgcgactcttgatgaatttaccattggtgatccggccgaggtagatgtcgcccaggacgtacaggctaccggcgttccggctgtgagcgccagcctctttcacaacaacgatgagcggctcctcgccttcgccagctaggcggattttcgggcgcttgataccagactctttcgccttctcaaacgctttctcgatgccggaaatgtccagagtcggcgcagcagcttcctgcgcggccactttctcgcgatacttggcgaggttttcgatggcgcgcttcgcagcagcgatctgattttctgtcaaggagccgtatttatacaacgactcctgaaggctctgagcgaagctgaaggaatttccagtccaccactcgatgatgtccgggtgcgcggcttcgaaggccttaattttgaggtcgcgctcttgcgcagcgctacagattttctcgatgcgcttttctgccgccttagcacggctcttggcgcgctgctccgggctggttttgtactctttgtatccgacgccgccgcaggcaaagcaggcgcgaccataagacgaagggccacggtacaggccggtgcctgcgcatttggtgcacttgtcgcgatacagcttcacttccttccgggagttcgggcgggcacccatggacacgtcttccagggtcttcggcgcttcgttgttgatctctacggtagcgaagtcatcacccaggtcttcgaagccggtgaacagattctctgctgcgttcatgtcgattctcctgtttggaaagttcgtttcgatgagttgactatacgccagaagtggaaaaacggtagcgatttctcactaccgttcgtcgggtcgaagacaatcaataaatgtcgctattgatcttgaacccatgctcagcgccgtcgttgtagtcgtactcaacataactgtcgcagtagtcgttcaaatgctgaatgatgccaagaacgtcgttcgcggccttgtgccttttcgcggcgatggtcttggcgatgctgtcgccgacttccaggatttcggccgtccggcgatggatcagcaggcgactccaaagatagagccggacgcgacgaataatgtcgcgatggcgctccagtcgtccgtgcaactcttcaatttcgtgctcgcgagattttaatactcgtcgaagctgttgaacttccaactccaaatcggccttagtagccatgttcacctcaaaaaggaaaatcgtctgggactccaggaagttcgacgattattgttgagcctgatcggtctagaatgcatccgaccgagccagccctgtgtggatagggtctacacgaactataacaggtgacttccctgactattcgccaggtcgatcctccacaccatctgcaaattggcgggcgcttcgacttcagttttcgttcgtccaggacggcgcgtctgtcgcaggaaaggcagcgtgccttaaccgacgtaaccatgggtatagtcgatcattcggatgagctcatcatcctctgattctctcgacttcagaccgcccaaagagtccgactggccgtcgcatttcgcatcgatatccatcgaagacaggaatcctgccgatactgcgatgatatcaactctgtcgccggccttcttgaagccttcgcactcagcatcgagggccacaattgcactcgcggccatgttcacatgactgatgaggtcggggaagatcacaggaacttcacgcgacatgccacggaccgtcagcttcaggactacatacttcatactcactatcccttttgtatgtgaggaaagaacttgctgttttccggatggtgaaaacgctcggtcgcaggcggtctttcttccggacattgaatcgtcgaaggcgggaaaaccgcgccggcgataatcgccgcgaggagtgcagcggatgtcgacatccagagggcggtttccaggctcacccgaacttccggacggcgcggcttcattcgctccaccctcttcccggttcataggatggtagactgccgccgcgaacccagttgtcccacatatggttcataccagtcggtggctggggtggcggactgtagaatccgggagtctcagtgctgctcaggaaataaggcgtgcaaacggcctggacgaccaattggtgccgctcccacatcttatcaatcgctcttagcatgacgtcttcgcactgagccttactgtcgaaccgtctgctagtatggtccggcatctggacgcagccgtctccagtgcaaaggaaagcagtagcaatccatacggtgatactcgccatttcgtcaccctctttagttgatgagcagagtctattccatctgctcgccaggagtaaagcgcttttcgtcgggataaatgccgatgatgtctgcgtcgagcatccaaatctccacggacggatcgtcgctgctgatgtggtacaggttgtacagctcccgtccgccgacagcgcgctcgcctcgcggctcaaccgccagaaccttgccgtgcccttctccgtgctcgtccaggtatatgacgtgatcgccgacttcatagctttctttcgtgacgaggcgtgaacgcgagctgttctgcgattccaccacccaggaatccagcacgccgcctttcatgtcgcgaaacaatcttgccgatttgtcgcaatcgaatacgcccagaacttctccgtctttcaacacgatatgtacgattggcaaaagagtattcatgtttaatctccattggttgataattagagtctaatctgccgaaaagttcccgtaaagaattattttctcataactgattagttgcaactgttaatctgatgtatatgtttgaatctcttttgaacgtttgatgtttcccctataataagcgcacacagccaacaaccacgtggaactacaatgtttaaactttcctggatattcgggcgcaaaaaggataatgctgcctgttctgaatcggcgccggagaaagtcgcacaaatccctcaacacgatccgctcgaccccatgatcaagctgggaaggattcgcggctggaacgtcgagccggagaaagccccggtcattcgtagtgtgaaagatttcctggaaccgggcctatctgtcgcaatggatagtgcgtatggtgatggaccaaccccggccgcgaaggctgctgcgggcggccagaatccctatgtcgtcccgactatgttgcaggactggtacaattcccaagggttcatcggataccaagcttgcgcaatcatttcccaacactggttggtggacaaagcttgttccatgtctggtgaagatgcagcacggaacggatgggaactcaaatcggacggcaggaagctatccgatgaacaaagtgcgctgatcgcccggcgcgacatggagtttcgcgtcaaagacaacctcgtcgaactcaacagattcaagaacgttttcggcgttcgtatcgcgctgttcgtcgtggagtctgacgatccggactactacgaaaagccgttcaatccggatggaatcacgcccggctcctacaagggaatctcccagatcgatccatactgggcaatgccgcagctcaccgctggctcgacggcagatccgtcttccgaacatttctatgagccggatttctggattatcagcggtaaaaaatatcaccgcagccacctagtggtggttcgtggaccgcagccgccagatatcctgaagcctacatacatcttcggcggtatcccgctcacccagagaatctatgagcgcgtgtatgcagcggaacggacggcgaacgaagccccgctgcttgccatgtcgaagcgaaccagcaccatccacgttgacgtggagaaggccatcgcgaacgaagaggccttcaacgctcgcctggcgttctggatcgccaaccgtgataaccacggcgtgaaagttctgggaattgacgaaggcatggagcagttcgacacgaacctggccgacttcgacagcatcatcatgaaccaatatcagctggtcgcggccatcgccaagactccagccacgaagctcctcggcacttctccaaaaggattcaatgccactggtgagcacgaaacgatttcttatcacgaagaactggagtccattcaagagcacatattcgacccacttcttgaacgccactatttgcttctggcgaagtcggaagaaatcgatgtgcagctggaaatcgtctggaaccctgtggactccacgtccagccagcaacaagccgaattgaacaataagaaagccgcgaccgatgaaatctacatcaactctggcgttgtgtcgccggatgaagttcgcgagcgtctgcgtgacgatccgcgttccggctacaaccgactcaccgacgatcaggcagaaaccgaaccgggcatgtctccggaaaacctggccgaattcgagaaggccggtgcacagtcggccaaggcgaaaggcgaagccgagcgagccgaagcccaggcgggcgccgtagagggcgcaggcgccccggttcccgccgctccacgcgggactaagcctctcgcgaaagcggccgaggaaggggccagcgaggccgctgaaccgccgtcgaggccggaccccaaggccgagctgcggaacttgttggtcgatcttttgtcgaagctccaagacctggacgacattaaggcgccggacggcgtagacatagagcacaatgatgcgcctggcttaaagcgcacatccaaacctggcgtgtctggtatggagccttcggtgttttcgtccaaccgcatcgtcgggcctcgtgatcattcggaactccagagaatcaaggtgaatggaataaccaccttgatcgaaaatccgcgcggaagcattcgacaaggcaaggatgggagttggcgagttcagatgaaacaccactacgggttcatcaagggaacgaaaggcgctgatggggatgaagtcgattgcttcgtcggtccgaatctgggatccaaacgggtcttcgtcgtcaaccaagtgaacaaggaaggtcagtttgacgagcacaagtgtatgctcggcttcaacaacatcaacgatgcgaagtctggatatctgtcctgcttccgtccgggctgggatggtctcggctccatccatgaagttgacctgcccgctttccgtcgctggctggcgaacggcgacaccaccaaaccattcgggggcgagtgatggcattcaaggcctccaaaaagcgcgagcgccgggcacctcttccagtcggaagagggaagcccataattccatcggcaggaatcgaggcctggtatcgaaagcagatgaaggatatgtccaagctcatgatctccgactatcgaaacgagattgagaaggcgctgtcccagcctgcggccgaacgtttcttcgccagagacgaatccgttaacgtcctgttcaagatgacccttcgaagcctacagcagcgatggagccgcatttttgaaggtttcgcggccaagatcgccccggagttcgtcaaccggaccgaagaagccgctaccgccgcgacccttcacagcttgtcggtggccggcgtcgatcagccacgagctgcgtataatgagagcgtcaggaacaccctggaggccgcaaccacttacaatcatactctcatcaccaagatccaagaggaagtccacgagaagatttacacatcagtaatgctgtctctgacttccccgaatccggaagagcaaggaacttccggcataactaacgcacttcgcaaagtcgggaagttttctgaagatcgaatcgaactcatcgcaagagatcaaacaagcaagctttacagttctctgagcgatgagagaatggcggaaaatggcgtcgaggagttcgagtggctacactcttctgccggcaagactcctcgccacacccacctggagaaagatgggaagaggttcaagctgaatgaccccagactttgggagggtccgaaagcagaccaggggccgccaggatgggcgattaactgtagatgcagaaagataccagtcatttgacatcgataggagcgctatatgccgttagttcatggcacttccaatgaggctcgttctgaaaacatcaagcgggaaatcgaagccggtaaagacccaaagcaggctgcggccatcgcttattccatccagcgcagtgagaaagggaagacggcgaaagattgttcgcctaagctcgtcgccgatcttcgcgccctggtggacgctctgtcgaggctcgtgaaatgaaccgcaagacgtgccggcgccgactcgtggtcgatgtaatcagggccaatattcacggcggattcttcagcctgaagtttgccgccatcgatttggcaatcatcggcttcgccatcttgatggcttttggccgataatgctgagaaaatctggattctgactaaaaattctagtccggatagccgcaaattaccgtttacggaaaatagcagtaatttggaaatcctactgccgcgaggctttaacagagccagttcctaatttccgatttagccgcatgcttcaaaagtatatagcctgggaaattagaagtaacgttccaatagaattcatctataagtaacgctataatataacgtcaatctatatactctagacgtattgaaattcaatttttaatcggtaaattggtaatttgaattagtttaggagttgaaagcctcgcggcagtaggcttagacaaatcccgtcaagtttccgagaccaaattaccggattttcgcggctgaggaaactggtaattagatcacaatacaaattataatgtaagttaacagtcgcggctacatctaattattgttccgcttatttacccttagatgtactgcgtatataatacagccatagtccacgactcttcgaattaacgatggcaaagtcgaaaagaaaaattgacgaaaatggatatatgaccatagagggctgcccgatcagctcttatggcgttttccaatattctgctggtcaactcggtcttccgggcgatccgacgcggattgtcaacgtatatcgcccggagtctgccgtcagcgatccggattacatcgaatctctgaagaatctcccgttgatcgacgagcatgagatgctgtcgggattcgacgatgatgacgatagcgtggcccccgaagacaaaggggtggagggcatcatcacatccaacgcttactacgaagccccatgggcacgcggcgatatccgcatctattcccgcaacatgcagaatcagctggaaaggggcaaagaagacctgtccctaggctatagttgccgctacactgagcaacccggcatctggaacggaacgccttatgaagtcgtccaggacaagatgcgcggcaaccacattgccctggtaaaagagggtcgtgtgccgggggccagagtattggatggtctgtgttttgaccatctcagttttgatttcagaccatccgatgagggtaatgaaatgagtctcaagaaagccaagcggaagccccctgtccagcgcgtagggcaagctgctgactcggcggtcgaagagttgcgcgccctgtggccgaagctatctgcgtctgtccagaagttcctgggcgaagaagagcaggagccggagcatcaggaaggcgcagctccggccgaaccgaccgacagcgagcacctgaccgagcatccgactctggaaggtgctcagaaagatgacgaagagcaggaagaggagccttccgttgtcgatccggccgtggccgccgtcgagccggagcatcaagaaagcgccgcatccgaaatgtccggtgaaggcgaagtcgccgaactgatctctcaggtcaaagccattctggctcgactggagggcacggtagccgaaggggcagacgaagagcatggcgaaggtcaagatgtcgtcgagggcttggaggagcagagcagcctcagcggctcgcaaaccgccagcgacgatggtggtgagagcaaggataacagcgaggaacttcctgaaatggcacagaagaacgcgcaagatgctgcaattcgcggtctctatcgcgacattgctgctaaagatcgcctctacaagcgtcttagctccgtggttggtgcgttcgatcaccgagctatggactcggctgaagtcgctgtttacggcgtgaaaaagctgaacatcagctgtgcgaagggccaggaagctctggcgctcgacatgtacctgaaaggcgtcgaagcctcgcgcggcgcggccagccgtcaatcgaaagcccaggattcggccggttctgctccgcagtgtgccgagctggacagctacctgaagggggagtaactcatgttccagaaacaagtttaccgccagtacactcctggttttccgggcgatctgatcgaggacggcccgaagcgggcgcggccgggtcgaatcatggctctgtcggccgtaactccggctgccaccgccaccggccccaaccgcatcagtcgcgctttcggttatgccggtgacgtcagcgccctcggcgaaggtcagccgaagaccatcgcggctcgtgcttctgaagtcgtgatcggcggcgccaacttctttggtgtcctcggtcatccgaagcactatgctctgttcggttcggccggagactccctggctcccagctatgatctgcccgatggcgccgaaggcgagttcttcgatatggccaccggcctggtcgtcgaaattttcaacggcgccgcaaccgccctggacctggactatggtgacctggtcgcctatgtccccaacaacctggctaccgccgacaacgcgcttggcctgccggccggcgccctggttggcttcaaggctggctccatgccgaccggcttggtccagattcccaacgcacgcatcgttaacgccatcagtctgccggcccagtcggcggggaatctggttgctggcgttaccatcgtccagctcacgcagtaaggaggcgtcatgagccagatcagcaagacccattcgcgcctcgcaggccgcaatgcgaaacctttcgacctgaaaaacatcaccaatgacgccgtggcgtctctgcgccgcatcggcctggtattcgatcacgccgtcgtccaggaccagatcaaggccttggcgaaggccggcgcgttccgctccggctcggccatggacagcaacttcaccgccccggtgaccacgccgtccatcccgactcccatccagttcctgcagacctggttgccaggcttcgtgaaggtcatgaccgctgcacggaagatcgacgaaatcatcggcatcgataccgttggctcctgggaagatcaagaaatcgtccagggcatcgtggagccggccggcactgcggtggaatacggcgaccataccaacatcccgctgaccagctggaacgccaacttcgaacgccgcaccatcgttcgtggcgagctgggtatgatggtgggtaccctggaagagggtcgcgcctcggccatccgtctgaacagcgccgaaaccaagcgccaacaggcggccatcggtctggaaatcttccgcaacgccatcggtttctacggctggcagagcggcctgggcaaccgcacctatggtttcctgaacgatcccaacctgccggcattccagaccccgccgagccagggctggtccactgccgactgggcaggcatcatcggcgacatccgcgaggccgttcgccagctgcgtattcagagccaagatcagatcgatccgaaggcggaaaagatcaccctggccctggccaccagcaaggtggactacctgtcggtaaccacgccttacggcatttcggtttcggactggatcgaacagacctatccgaaaatgcggatcgtgtcggctccggaattgtccggcgtccagatgaaaaaccaagagccggaagatgctctggtgctcttcgtcgaagacgtgaacgcggccgtcgatggcagcaccgatggcggcagcgtgttcagccagctggtacagagcaagttcatcaccctgggtgtcgaaaagcgggcgaagtcgtacgtggaagacttctccaacggcaccgccggtgcgctgtgcaagcgtccgtgggctgtggtgcgctacctcggcatctaacagatgcctattcaccaaaggccgggcttccggcctttgttcactctgactctaactcggttgtaggggccggttagggcataattactaggactacgccaatgactgtttatatcgtttcctccatgactcaatcggtgtcttacaatgcgtatgacacctctgatccgtccaatcctcgcctccagcgaaagattctgattcgcggccgcgcaggcatcgcatccgaaacttccggcttcggcgacatgatttccgacgaggccggacgtccgatctggaccccacagggcgattgtactgccgtgagcgattcggatttcgagctgcttcaggccaataagattttcatgcgtcacatggagaagggttatctgcgagtcgtgaagaccgacatcaccagtgaccaccagcggatttccaaagagactcgcaccatggagcgcgatggattccagcctctggatgctactcgcctgcagcagaaaatcaaggtgaccacagccagcgcttcccaggaacaagagttccggatttaaccgagggtttcggtatggtgattttcgacgaacataagtttcgcacgctgtttccggagtttgctgatccagccgcttatccggacgtgcgcctgcagatgtacttcgacattgcgtgcgaattcatttctgatcgcgattcgccataccggattctcaatggtaaagccctggaagcctgtctgtatcttctgaccgcccacctcctgtcgctgtccacgatgcaagttcagggcgcggctggaggtggcgtcactgccggtgggacccagggcggtttcatcaccagcgctactgtcggcgaggtcagcgtggccaagctcgcgcccccggccaagaatggttggcagtggtggctttccgggacgccttatggtcaagagttgtgggcgctcctcagcgtcaaagcggtgggcggattctacatcggcggtcttccagagcgccgaggcttccggaaggttggagggacgttctggtgatccctggtgcgaatcttctgcgaatggccttcggggtcatcggtactcaaattgtgaaatatcgcaagtttgagcagcgagtgaagaatgatcaagctcagtacgtttccatgttcgaggagcctttcgacctggcagcgtctgttcagcgagtccgacgcgatcagtatgtccagtttaatctggagttccaacggaattacgttatgatcttcgccaactttgagatggttgacttggatcgcgatgtggccggtgaccagttcctctggaccggaagagtctttcagctggagtctcaaggctcctggttttatcaggacggctggggagtttgcctggccgtggatatcggtgcggccaagctcactgatgacgggaaaccgactttctaggtgatgtatgtttgacggcgaactgatagcgaaactggttgtcgagttgaatgcggcgatgacatctgctcaagaggctttgcagttcccggattttgaagtcgtccagaaagctcagccgacccaacagggaacgtcaaccaggccgaccatctttttccagaaactgtttgacattcctcgcggctggcctgccaccgattggcacctggacaacacggcccgcaaatatgtagaaataactcgacagcatgtagagacgactttccagatcagttcccttcattggcagaatcctgaaataactcacgtggttacggcttctgatatcgccaactatgtgagggcttatttccaagctcgatccacgattgagcgcgtaaaggaactggacttcctcattcttcgcgtgtctcaaatttccaacgaagcattcgagaacgacaatcaccagttcgaattccacccaagttttgacatggttgtaacttacaaccaatatattcgcctgtacgaaaacgcagcatattcggccgatggggtattaataggcatatgagtctgaggcgcgattcagagctaatcgccgcgcacctccagatgttaagagccatgcgcggcaggtccgtttcagccggatggtattccacggctcgatatcctgacaaggcaggcggatcggtcggaatacaagtcgcgagaatcgcacgtctcaatgagtacggcggaactatcgaccatccgggcgggaccaggtatattagggacgccattgttcggggtcggtttgttggcgttcggttcgtcagaaacgactttccgggagaaaccgaggtaactaagcctcacagaattaccatcccggctagaccgtttatgcgatatgcttggaacttgttttccgcagatcgcgccgcaatccagaaccggatagccatgaggctggccagaggacagatcactccagatcaagctcttgcccagatcggcctggcgttggaaggatacatagccagaagcatcaggaccgggccatgggtggctaactcagcatctacggtcaggagaaagggattcaacagaccgctggtcgatacggcgcacatgcttcaatcgattagcagcagagtaacataaccaggagatcatccagtgatcagtcagagccgttatatccggatcatttcgggcgtaggcgcaggcgctccggtcgcaggccgaaagctgattctgcgcgtcatgactaccaacaacgtcatcccgcccggaatcgtcatcgagttcgacaacgccaacgcagtcatgtcatacttcggcgcgcagtcggaagagtatcagcgggctgcggcttatttcaaattcatcagtaaaagcgtgaattcgccgtccagcatcagcttcgctcgctgggtaaacaccgccatcgcgccgatggttgttggtgacaatctgccgaagaccatcgccgatttcgccggcttctcagcaggggttctgaccatcatggtcggcgcggccgaacagaacatcaccgccatcgatacgtccgcagcgacttctatggacaacgtggcgtcgatcatccagaccgaaatccgcaagaacgccgacccgcagctggcccaggctaccgttacctggaatcagaacaccaaccagttcaccttggtcggcgccaccatcggcaccggcgtcctggctgtggcgaaatctgccgatccccaggacatgtccactgccctcggctggtccacctccaacgtcgtcaacgtcgccggccaggctgccgatcttcccgacgctgccgttgccaagagcaccaatgtcagcaacaacttcggttcgttcctgttcgccggtgcgccgctcgacaatgaccagatcaaggccgtgtcggcctggaacgcggctcagaacaaccagttcatctacacggtcgcaacttccctggcgaacctcggcactcttttcaccttggtgaatggaaacgccgggaccgccctgaacgtgctgtcggcgactgctgccaacgacttcgtggagcagtgccccagcgagattctggccgccaccaactacgatgagccgggcgcttcgcaaaactacatgtactaccaattccctggccgcaacatcaccgtttccgacgataccgttgcgaacaccgtcgacaagagccggggcaactacatcggcgtcacccaggccaatggccagcagctcgcgttctaccagcgcggcattctgtgcggcggtccgaccgatgctgtggacatgaacgtctatgccaacgaaatctggctgaagtcggctatcgctcaagcgctcctggacttgttcctgaacgtcaatgcggttccggcgagcagcactggcgaggcgatgaccctggcggtgctgcagccggttctggacaaggcgaccgccaacggcacgttcacctacggcaaggaaatcagcgccgtccagcagcagtacatcacccaagtcaccggtgatcgccgcgcctggcgtcaagtccaaaccctgggttactggatcaacatcaccttctccagctataccaacagcaacacaggcttgaccgagtggaaggccaactacacgctgatctattcgaagggcgatgccatccgcttcgtcgaaggatcggatgtgatgatctaatggtttgcggcggactcgatccgccgcgaccttccataaatggagtgaggaataagcaatgatcaacatttctgcgttcggctcgatctgccagttcacggcaagcagaactttcccgaacggattcaccgtcaccgagtttgccgacgatgcggaccccatcgacagcccgccgttcactgcggccgataccggcgtcggcctcaacggtgacatggtagtctggaaccgggcgaacatcctggaagtcgtcgttaacgtcattccgaataccgagggcgagcgcaacctggcagtcctgctggatgccaaccgcaccggaaaggacaagtcgggcgctcgtgatgtcgtcggcctggtcgtggcgatgccggacggcagcaaaatcacctgcaccaacggcaccccaatcgacggcgttctgatcaacgcggtggcaagcgtcggccgtctgaagaccaagccgtatcggttccgatttgaaaaagtgatcaaagccggtactagctgatgaagaaaattccgctgacagcagtccccaatcaagcgatctcatttaacgccggtagcagctattggaagattcgcctgtaccagaacatggacatgatgaatgccgatatcagccgcgacggcgtgatcgtttgccatggggttcgctgcttcggcgggattcctcttctccagtacagccatcagtaccgacctgactatggcaatttcgtcttcgaccgcgacgccgattggacattgttcggcgacggcatcaacctgttctatctggacggcgccgaattcgccgagtatcaggcgcttgccacgaggaaagaatgagcacatcaacgatcagaaccgggacgaacaacgatatccttttggacgacaatggaaacatggttatcctcagggatgtcgaagcgtgcgcccaggacgttcgggcggcgatgctcatgcgcaccggcgaaaacattttcgatgtgaactccggcgtgggatatttcgaatacatcttctcgccgcagaaaagctatgatgacgctcgcaaatccatcgcggatgcaattttatcctcgccggatgtgaccggcatcgagcagcttgacatcgacataaccggggaagttttcggcgtcgatgcgaaagtcatcaccatccacgggcctgttaccacaggagtttgaaatgagtaccatccgcatccaatacgccaacggcacccaactgttcctggacggcaaaaatccgccgcccctggacccgctgccctcgtttaacccgtctgtcgaagatctggaaggcctggaccgcgaaaagaacatcgacaagggcgactcctcgccggccggtcttcccgttcccccggtaaacgtcgattccaatgtcgacaacggcggaaccatcccggctccggtatcgaccgacgctgctgcggccgaatcggccccagaaggcgcccaggaagctcctgcagcaggccaaggcgacgagaaaggcgccgaggaagccccgactacagccccggtagaaaaggccgaggaaacggcctcgccggccgctgaagaggaaaccccggctcccgccaaggccacctctcgcaaaaccaccagcaagtaaggactcgacatgatcaacgtcagcggcttcggcacaggaattgtaatagtttcagcctcatcgttcccgatggggttttccttgtcgaagttcgctgatgatgagagtccgatatcctccaaagagctggagccgttcggatatgagatgctttatgacggcggcctattcgcctttgacaaggctgctcctctggaagtatctgtatccgtcatcgcagggagcgaggatgatattaaccttcgcatccttctcaattccaaaaagggatcattcagatttcttccgggcagcatcccggatatgacgactctcgtggccactcttcctgatggcggccgcaccgttctgtccaatgggactatcatcaagggtccggccatcgacaccatacagaacaccggacgacgcaaaggcaacacgtacacttttgttttcggtagctatcttggcgcccagactgcgcgtcaagccatttctaacgttatccaatcggtgctggaggtggtctgatgttggggattttcaccagcctcctaagttcgcgatctttttcgattgtggaccaaaacacaaaccagctagttgctgcggatttgaggataagccgggtcaacacccggttttcttctgtagggcaacgccacatgctggaagatggtacgaccaagatggattccagaacgatccaccctatggaaatcatcgtcgaagtattttgcccttcaattgatgtcgtcgatcagatcaatcaattgctcctggatcgcgacacactgtacaaagtcatcactcgcggcatggtattcgaacggatgatgtgtaccagcgaagcgctcaatcagactccggatatgatatcggcgactcctgcgcggctgacattctcccaagttctcgtccagaatcccaagcctataatgttcagaaatgcaggggactcttctatgatcgaccgagggctggccctagctgaagacgtggttggctcggccggcgatctgttcgactacgcagtaaacggcgtccagaacgccgcagacttgttctgaggtgccaattgaactctttcctcaagtctattctcaacacgcctactctcaccatacgcaatgatgttaccaaacttcctgtctggaagagtcttcaagtcaagaaagtggaaatttactcgccggcttccgtagtgtcgaaacctctggcgacgaaagaccagacggaagctcaagtgtacaccgaagctctggacattgatgtgaagaatggaaagatcatccaaccggtgcgactccgcatcaatgctatctgtccggacctgtccaccgttgaaagtatcatgaacgctttcaatgataacacctcgactttcgctatcacttctaagtcgatattggccgataaaatggccatcatggcgctcgatgtagatcagtctccagacatgttgaacgcggctgagatcaatatggaattcgagcaggttgagcctccagtattgaatgaattcgatcctgcgttccctcaagatagtccgacttatggggtacagattcaatctctttctgatgctaatttgctggatttgggcgccatcggcgattcgatatcttcggccgcaaaatcgctatataatcgcgtgaccagctacttctgaggatgtatcatgcttgaaatcaatcttcccgatggccgtcaaactcgcgtacaaatcgaggcgtggtcggcattggatggctgggacctccagcgccgtttcgtcgaattcgctgtcagccaagattccgacttccgccgctctttcaccatggaaatcctgggctatgcgaaagtgctgcttggtgacgatgacgccggcattccgctgaccaccgcggcagtcatcaacaaccacctcggccactggaagaacgtggaactggttttcaactctgttctcaagcacaatggcatcgacccggccacgcacgccgaccggccggactattgggaacaagtcggatcgcagatggccatcgcatttctggccgaggcgtccaagctcattggtccagcaatgaagatcgccgaaggactcgccaacaagccggagtgattcatgtctagtgatttggatgaattcatacttcggtatgaggccgatactgccagagccgagcgcaatctggagcgcctccagaaccagatcaggcgcgtgaacagcgcatcgacgagtggccttcaggatttgcgccacttcgcagacggcgcggccaccgaactcggcagagtcgttccgcagattgattctgtgacgagcgcaattcgcggaatgaacgcgcaactggcaataggcgccactggcgtggccctggtcgcggccggcgtcaaggcgttcatgaacaccagggaccagtacaatcagcagcgcatccaggcgatggacatcggcatcgccccggcacgcttggaagagtaccagagaaaattcgttcgccagtccggtggaaccatcagccgcgagcagggcgcggagatgaccaaaaatctggcagacactttccggcgtgcttatcgcgatatcgggcgagtcggcccggaagcgcgaattctgcgtatggccggcgtcgatgtcgggagcttccaaaagggcatgcggccgctcaacgacatcatcaccgatctggccacgaaaatggccaagctgaagccggacgaaatttctgcctacgctgatgcccttggcgtctcgcgagattacctgagcaccctggcgaagatcggcccggccatgggaaaagtcactgagatgacgactgcggaactccagtccagggtccagggcgagtccaacatccagaaattcaacgatgccctggcgaatctcaaccagacgttcactaccctggaaaaccgagtcggcgaaaagctcgcgcctgcgttcaccaagctgatcgaaatcatcgacaagatagtccaggctattcccaatgaagtggaaagcttcgcgaaggacaccaaatcccgttgggaagatggagtgctcgggaaggcgaccgttggcagtgatatcctatccctcctcagccccggcgccctgctcggtcgcctggcagcgtgggggactcgtcgcggcatggaagaatcagggctcatcgacaaggacaaggttcccggcgctcaaaccagcgaagacctggccaagaaacaagaagaccaggacaaggctactaagtccatgaaagagctagagaagctggctgaccagaccacgaagtctaccaatgattttgcggtggcgatcaacatgttcagtggcgcggtatcgtcgttcgcgaatgccgttgacgagcgccaagcttgggcagcctgggcgggggaaattggtcgggcggtcggtatgggaagcaccgcgccgacttcgcgggccaccggcgtctatccgcacgcgatctatgatcagtcgaagagtggcgcggccggacaggtcttcggcgagccaatcggcgcccagtctcttcgcaatcgcatgttctcgccgcagcgcaaggcagagccggtcaccgttccatcgtacatcaacgatatcatcaaagatgcttcgaagatgtacaacattcctgagctggacatcaagaaactcatatacaccgaaagccgattcaacgccagggccaccagcgaagccggagctaaaggcctcatgcagctgatgccggaaatcgccaaggcgtatggtatcactgacgtatatgaccctcgccagaacatcctcggcggaacgcgcctactgcgtgaaaacctagatcgagcaaatggcgacatgcggttggccttgacatactatcatggcggactcgatccgaagaactggggcccaaggactcgcgcatatccgggtttggtaatgagcgctccaatcgagctgatggaagaggctcagcgcaagcagaaggctgcggccatgaccgtcgccaacgagacgttcgccccggaaggcggcgacatggacattcgtccctatgatggcgggcgactggaaaccccagaccagggcaagaaggaagatgagcgccgcgaagcccgtcgatatgacgacagggttgtgcgaccggaaattcgcatcatcgaccgcatgccagaccgcagcgacggcgaaatcctcaagatgtctaggcgtcaagaggccgaccgggcagactctggattccggaagttcccgaatcaggttcgcggcgagaccaagcagaacatccaggcccaactcactgccggagccatcgcgcaagtgatcggcgttaaccccaaccagatcatgcgccgcgaaatcagccgttctgacttgctattcggatacaaccaagccatcctgggcaagcagcaggagatcaaggccgccgcgaccgaggccaacaacgtattcctttctccagccaagctcgccgaagccactgccaaggtgaacgccgcatcgcgagaaatggatattctcaggacgtacggcgagcaacttctgaagagcgctccagagcgcggccaggagctgaccatcggtcgaatcgatatgttggtcaacgttaccggcgcgaattctccggaagaggctcgcgagatattcagcaagcagactgcagaccagctgactacggcaatccaagatgcccaaaacgattccgcaactaagatactctactgatgaaaaagagaattctgcgagtaacattcaacatgccttatggacccgaagtcatccgagaggatttggatgttcgggtccggatcatgaaggctgcgttgcggattcagaaccgggcgactatggaaattttcggcctaaccactcagctgcgtgagtctcttctgtcacagttcaccgcgtggaagcaccggcaacgtcaagtcggcagggaagacgaattgatgatcaaagtgtcggtggaagccggctactctgaccaggggcgcgagcaagtttccagagtctttgtcggcgaagtggccattgtcgatatcatttcgccgccaccggacattggaatccgcatccagtgctacaccaggcaaatcgacaggacgaagaccattcggaatatgccgcctgccaacacgacgtttgtcaagttcgtcgagtggggcgcaaacgaaatgggattgaacttcatttgtgataccagctacaacgaccaagttttgaaaaatccgggccggtctatcactgtcgcgtcggcaatcctggcgtcgattcaggatatgtacatgccggacgtggccgcgttcgtcgatgatgacatattgatcgtgaaggaccgcgataaagtcattcgtccggatgaggtgaccaacgtcaactcgtttgttggtattccatcttggtctgaatggggcgtggaattccagtgtctgtttgagccatcgattcgcgtggctggaggcgtggcggtcgaatcgctcatgaacccaagcgtcaatggtaactatgtgattactgctctggaatacgatttggccagtcgtgatcggccgttctatatcaaagtcatggggagtccagcggcataatggccagagaaatcaaatcattcaacatgttcggagtccactatacttcgcggcaattctctgctgtcgatgggctcagcatgatgtcggaaattcagagcgtgccgccagaagaattgctcaagtgcaccgatgtattggcgcatccggaagaccatccggaaggcatctggcttccattgactgctgcgaacatcaatctttatgtcgttgatcgagcgaaagtagtagctcccgtacaagttcttgcacttctgtccgaagtggtaatcgactggaactttggttttctcaaagactggaccggagtcaagattccagccagatttgtcgaagacatcaaaagcgtgaagacggcacattcaccttctgtagttgcgagcttggtcgcgaacggctcagcctctatgcgcgagttggaagagtattattcgactcaagatgcgtttaagatgatagacatcatgacggcgaagagcgtgaacgaggccttggcgtccgaagcatcgcacaacagaatcaaaaagggataattcctaaccgggcctgggaaggctatactagacctgccaaatcagaggctttcccatgtccaatatttctctaacatccgcaaaagctcccgacaggacgcgactgatcgccgctcttgacgctcggtcgcggcgggatgctctagatttcgaagtaatgataccggctcaggttgttcaatatgacagggccgagaatatcgcgacgattcaacctctcatcacctgggttgacacggaacacaacgccgtccaaaggcatcagctggttgatattcctgtaatttccatgggggctggcggcttccacataagtttcccgattcagcaaggtgacataggctggatttatgcggccgaccgcgacacgtctcagttcctggagtcgttgtcaatgtcgaagccgaacaccggccgcatccataagttcgagcatggcctgttcatcccggacgtattccgtcgatacaccatcaattccgaagattcggccgctatggtcatacaatcgacttccggagcgaccagaatttcgattcgcggcgataacatcaagataactgcgccgtcgaacgttactgtggatactccgcaggcgaacttcaccggcaatgtgactatcgctaacaccctggtcgtaaacggcatcaacgtgaaccaccacggccacctcgaaaacaacccgcctgatgcccggacgaaaggcggcatggttgcttaaggagattttcatggcaagttctgatttttctgatttaacagcgggggggggttgtaatggctaactacaactacatcgtcgatactggtgtgatagtcgcagataccgccgacgttctgagcgacgttgaggccgagttccgcgccgccctcggtgccaatatcaacttggccgcgagcactccgcagggatcgcttgtcgcggccgaggccatcgcccgttccagtgtcatgcggaatgaagcgcgaattgccaataccataaacccgaacgtttcattcggaacgttcctggacgcgatctgtgccttgatggggatcgagcgcggttctgatctgtcaaccttcggctatggagttcaagtcaccggccgcagccaaacccgcatttccaccgggtctagggtccagactccggccggcgcgatcttcacagtgatgagcgatgtcacgatccctgctggtggtgtcgcgaccatcgatatcaaatcgcaggagtatggcaacattcctctgccggtcgggaatctcatcatcatcgacggaacaattggatggtccggagcaaaagtcatcgcctccactcgcgtcgatccgggcagccgccaaatgagcgatgcagagttgaagaatgcccgcgttaatcgattggccatccaaggccgcaactcgactatggccatcaaggcgtatgtgagcgccgttccaaacgtcacgtcggtgaacgtaatcgagaacaacaccggcgccgttcaagtggtgaatggagtctcgtttacccttccgtatgctgtttgggtctgcgtcgccggaaacccggataaacaagcagtcgccgatgcgttgtgggccgcccataacggcggaactccatgggactatggtgcgacgaacaacggcgtcccggtggacggtccgaatggcgttcctgtgcgcgatccggcgtccggtcgaaagtatgtcgtgaagtggaccactccaatcatgtacgatggatatgttaacgtaacagtccagcaaggttcctcctctgtagctccggaagccattcagaacgcagtggtcaattacgcccaggggaaagtggaaggagaagaggggctggtggttggcgcgagtctgtcggcattcgaagtcgccggcgccatcgctcgcgaaattcccggcatctacatcaaactctgccaggtcgcgtgcgtcgcggctggctcgccggctccggctccgggcgatttcacttcggaatacgtcatgagcgcattcggccaggctaccatttccgttggtaacgttcgggtgactttcgtatgactctgcctgcgtacaattcggacatccaacaagctctgaaatggctccataaccaggcgcctggaatcaccggcctgatccagagaaaggcgcaatggtatgacagattcagccgccaattctgggccaactgggagcgcgacgttttccacttgaaaactgccaatccattcggactcatggtctggtgcataatcctcggcacgccttcgaaagggttcggcctttatccaaaaaacagttcttgggcattcggtcggctacgccagaacttcatctatagcggtacacaagttccgccaccggcagacgcatcgccgggcggcaacttctacggtggcggcaatgccgaaattctcaacttggacgaaatcaggaaagtgcttcagctaagatatgtagcgctgatttcgaacggctcgattgcatatatcaatcgcatgcttcgttacatattcaatgatgatgagccatgggacgaggcgaccggtctgtacttctatctcatggactcaaccggcgagaatggccctgtggagaacttggcagtatatcggaaagattgggaaggtatggtgttgttgtccagttcgcccagaacgaaccacgtgctgacatcgacccctgccagcgacgccgattggccaggagtcgatccggccgcgagcggaattccggtaacggtcgaaacggcgtccgctacggccccggacggctccgctacggtgtgcaagcttactaagccggccgggagtaccgcttacgtctccgcgccgatagatgggccgctggggtccggtagcactgtaacgttctcgttcttcgcgaaagccggctccacccgtttcattgcaattcagtcggctgccgatttccccagtcgagccgatgccgttttcgacctggattccgggaacgtaatcagcgatcagatgctggacagcagcgtggtaagcgcccgaatgattcgtctggaaaatggctggtggcgttgcgttctcacgaccaagaccgtcagctcttcgttccgcgctgcttacgtcgctccggcagaaaccaacttcagctggattgattcgaattccagcgcggcgattgacgtgcttatctggggcgctcagatcgaactgggtgatactccaactggatacttgaagactaccggggcgcccgtaaccatcaccgattatgttttgcagaacgcccagaccggaacagtcaagttcacacagccccttccgaccggagtagaagcgtattggactggagactggaaaggcgggactgcagcagaaccggccagattcgcagtcgggaatgggactcaggatacgtttactctgtcagaccccgcatacatcggcctacccaccagtggggcgttcaagctagaatacagggttggtccggcgcttaatctgtcgccgcaattgatcaacctcatgaatgaccgggcagttggtattatgccgacttgcgccggttgcgatgtcaaagtcattcaggagtaatgacgtgatcacacccgaactgatccccagtccgtttgccgctcagggcgataaagacccgattccacaaacctcctccactggttttgccaaccttcgcgacggctacacgccggactatgaaatcagtctggcgtcgaacaacccgcaggccaaagcggtcgagcggaaaattcaaaaccaactcttcttcatcgcgacccagaacgcacaggcgtggcagcgacaaatggcgccgccgtggtttcagggcatgcctggcggctacgaacagaatgcagaagtcgtgcgcgtcggaaatgacggcataatgcggcgttatcgttccatggtgaatgccaatgcgagcgaccctctcagcagcacgacttgggaagaacaacccgcatggtcggcgatgcgctccaacatcccgatgccggccggaggcccaggcctatcttctggcggagaagtcatcacgaccggccgcaacttcaacgacctgttaaatgggacgtgggagttcttctctgattcagtggttatcgcttctcagaatgcccccgtatatccggcttccgctggtgccgctgctggcatgttggaggcgaaatcttgggtgtccggagccaatacgttctgcgtccaacgctacactgatcgcgtcgggaacgtcgctgtgcgcgggcttaatgccggagcgtggaccaactggatgtatgcggtaaacgtcatggcccttcaacaaggtcgggtcacctatggagtcgcggccggatcggcgaacgcttacacgttgacgctagttccgcagctccaaggcggcctggtggatggcatgattcttcgggtcaagttcaacaccatgaacaccggcgcctccaccatcaacgtctccggactcggcgccaaagccatcgtcggcgcggccaacttccctctcaccggcggcgaacttggccaaggactcatcgctgagcttgtattcgacgcagcaggcgactgctggagaatcctcgcaggcgcgccacgcatccaagttggcaacgccgatcaagattaccaggcccccagctggaaacaggtgaaggattacgtcgcgtcccaaaagctgactgaagtggactgggctgacgtcgtcaacaagccgaacgtcgctatccaagacactacgccgtggttcgccaatctggagttgtccgacgctcggcctttcatcgatttccacttcaacaacaaccgcgccaaagacttcgactatcgctttatctctgaagctgatgggtcgatggcgttctactctcgccaggggtcagctggtcctacccaggatatcctgttcagcaggtcgaatgttacattcctccagccgcgactggatgttgcgaaaaacctcgcgtacatcgcgaactctggtcccctttggcagaacaccactgccgatcaacctggttggaaattcaccttcgcacaaggtgtggacgccaacaacaacgcggttatcgcagtcaataccaccaatccggacggctcctatcgctcacagatcatgcgatgggactgggcgtccacgaacgtcatattcaacaatcgtccgctctttgccggtcaatacactccttgggattctggaaactttgatccggccaccaagctcactgtcgggactaccaacaacatttcgggaccgaccggaattcgcaataccaccagcaataccggaaatatgaacacatggggctccagctccacaactgcatcgtatggaaacgcagccattcaaatcttcggtagagggggtggcgagcctgcgaccatctacttcgacaactcccaaaccggctggtatttgggcatggacaaggacggccagctgaagcgagcaggctggtcgctcggtaataactcctatgtggtcaccgacgagtcgaatattcgtttccacgtgaattccatggctggcactccggtatggggcggaaacgaattctgggggccgtggaacttcaacccgaacaccaagctgaccatcaaagccggcacccaggaaactagcagcactgcgatattcagcggaactatgccattcgctccaatcgcatcgctgtccgattattctcaggcccctttgacggtttacaactcgccaaccggtccgtctgcaaaaccggccgtcatcgcgttcattcgtcctggcaactggggcgcgttcttcggcatcgataccgacaacaagctgaaatggggcggcggatcgctcggcaacagttccagggaaatcgccgattccagcaacatcatgaatctttgggcggccaacccgaccgcgccgtcctggaacggccaaaccgtttggcgatccggaaactttgatccggcgacgaaagtggatttgaacgccgcgaacgccaccaacggcaacatggtcttcaaccgcatttctggaactggtagcggcatagcttcgtccggtcgagttggtgccatcaacctgcagaatggggcgcattcggggcaagcggccgcagtcactttcgagcggggcggcagtatcttcgtcaacttcggcttggataccgacaacgttctcaaagtaggtggcggaaacctgggggcaaacgcctatccggtcatccacgccgggaactacaataactacatcaaccaggcgctggttcaggtgggtcttggcggagtcggttcctatggcatctttgcggttctggacaatgccgctccaaccgcgaccgttcaaccgggagtggttgtggacggttccattctcatctactcgtcttgcgccgcaaactacaatagcggtcaaaggcctgccggaacttggcgctgcatgggatatgtagtcaaccgggatgccaacactcctgactccgcgacccttttccagcgagtgacgtgacatgaagtggacgcggatcagaaaccctcgttggctagatggaacaaatattcacgccatggtgactttcgaggggatcggggaagttcctttcactgccaatccgcacgacgtggaggcccacggaagggccattcacgctgcgatcctatcgggggcgcacggacctatcgccccggtcgatgcgaagcgggagcaggccttgcaggacgctatacgagcaagggaaaagcgggctatccttcgtgatacccgctggcccatagatcgttacgacgagcagaggcggctgggtatcgaaaccacggacggacctgggctgatagcagcccttgttcactggaggcagcagattcgcgattggaatagcggggatcggccgcgacttcccatggctctgaaaacgatgttcaagaatcaggagtattaatgaaaatcacgaaggatattctgatcaccggaaccgggtgcaccacggatcgggcgatcaagtggctggatgatgtccaggcggccatggataagttccatatcgagtcgccgcgagccattgcggcctacctagccaacataggtgtcgagtccggtggactggtgagtctggtggagaatctcaactacagcgcccaaggattggccaacacgtggccgcgccggtacgcagtagacccgcgagttcgcccgtatgtcccgaatgctctggcgaaccgcctggcccgcaacccggttgccatcgccaacaacgtgtacgcggatcgtatgggcaatggttgtgagcaggatggcgacggttggaagtatcgcgggcgcggcctgatccagctgaccgggaagtcgaactattcactgttcgccgaagactccggaatggacgttctggcgaagccggagcttctggaaactccggccggcgcgtcgatgtcttcggcctggttcttctggcgcaatcgctgcatccccatggcggaatccaacaacttctccatggtcgtgaaaaccatcaacggcgccgcgccgagcgatgcgaaccatggccagctccggatcaaccgttatatgaagaccatcgccgcgatcaatcaaggctcctgatattcgcccaaaagaaaaggccgcttattcagcggcctttttgctttccggctttgcctctttaaccatcttgacttcaaccggcgcggcggactcttcctgagtgaccgaatccacatagttccctagtgaactcagaacgccgattaacagcgctcttaccaccttgtccttgactgtctcgcctatgatcttggtcagaacggatattaactcttcccggagtctggggctgattcttggccgaaagcgcttgcgatgctctttgcgtttcatgtttagtcctctgtctgcggtcttctcctcaccccgataatggcttggggatgcgctgtgttaatcggaaggttcgggcgctattataactcgtcgaaaatgctcgcgcttaactgtttaacgatacgcaccgcgatattaaatcgccttctttctggccaaggaactctggcggccgggtccggtctaaggcctaatttgtcgacattaaaacgagaaaacccggatcgcctgtagggcaatgcgtccgggtttatttctatctagtgtacgctaggatcagtgacttccgccccacccgtccagccagcaatcgaagacggcgtgcctcggcttgtccttggcgccatgggagaagtgcttgaaccggatgacctggcccttgagatactccctgtcattccagcggcgctgtttctcgtcgtgggtcaggctggaggccgacacgttgaaagtgactccaggccacagacgttcgttgcggcagactaacgcaccgaccattccggacggcgacaggttttctgcgtggctggagcgggccgtgtggccaagttcattgatgaaagcttcattgttgttgtgcatcaactcttccacgtcgatgatctcagcttcatcgtagtcgtatcgcttgactttcacacagtgcccttccttggcagtcgagcgaccgaacttgtacagcccatcagcgcgcttgcccatggaaccttcgaatcccagcattgtgtggcggcgctcgacttcgctgaactgttcgatggaagtcaccagttcctgctcgaccaggtgaatcctctcatagccgaggcagtgacgaaggaagttcacgcgctcggccgccctggctaggcgatcttcggtcggtgcgcgaggatcggtgaaatcatcgaacacatggaaagaccagtccggctcaccgctgtggcggcgaagatcgccggacgacttctggaaaactttcgggtcgctaatgtcgccgcagaccagctcgccgtccaggccgttgaacagtttatcgctgaggtattcgtagatcgattgattgttctgccgcttgagttgacgagtcagcgcctcgccttcgaatacgaagcagcgaaatccatcgatcttcggcgagaaatacatcggcagttggccttccagcagcttcgggtcaaaattcgatgcgagcatgggtttcatacagttctccagaaaagaagcccggcgaaccgggctaaatggcggtaagccggctcagatggtttcgttggcgtggttcagttcggccatgatcgacgcatagcgctcgtccgactccttgatgaacacgccgtcgtacatgacgcctttgcgatccttgatggtgtcgtaggccgcagcgtagcaggcgagcatggtagtgtcgtgctcttccgtcacatcgaacagagtcatgacggccaataccaggctcttgatggctaatccatgatttccgcgtgccagcgcgccggccagatgtccgaggtgctgcaaatcgtcgccgtaggtgggatgaacttcgacagtctcgctgaagaccgatagatgatcgaacagattttcaccgagttgcgcggccatgatcgtggcaaccaccattacgtcgccgatgccgtctttcacctcgactggtttgttataaacccaggcttcgcaaacttctgcgaactcttcgaccaacttcaggaattgatccttggccgaagagcctttgatcaggttccggtcggaaccccatttaacaaccaggtcgtgaagttcgcgactcatgatttgttcgatattcattctttcgattccttttggatttgggattttactgcgttgattatggacgccgtgctctggcgcgatccatccttggtggtgccgaagtagaaggccattaccgacttcagctcggcgaaccaatagccgatgatggtgccgatggcgaccgaggatgttgggtccatcagagcctcgcggccgaatgtgaagattgcgatgatgatgagaatggagcctgtcagaagagcgaatgtaatcgccgggcgaacgaaatcgttctgctgcgccgcaagcctcctcgcagaatccctgtcggccgcctctgcggcgaactggctaagctcggcctggagctggttctgctcagactgaaggcgattttgttcggcttgaatcgcaagctcctggagacgaacgcgctcggcgctctggagttcggcgagacgcgctagagcttccggattcgcgtctagagcgctagcgaccgaggctgggtcggccttcgaccccagcgccgtcgcgacgatagcgcccacggcggcgcctgcaggcccacccaggagcgaccccagagccggggcagccgcgccgatcttactacctatgtctttccagtccatttcgactcctcaaaagaaaggcgccattacagcgcctttctccggccggtgattcagaactcttcggcttcggtcgcatcgccgacgccaccggcgtcactgcgaggctgttcctgcttgctgtagtccaccttcacctcgccgccgacgaacgacttgtacaggtcggccgcagccttgaagtgatccgggttcttcaccaggccttccagctcgaactggacgccggaccagctacccttgtcgttcgacatgcctacggtggtcatgcggaccaggttggcgaaagtaggcggggtgcgcaggccctgcggggtctgaacctttttctgggacagcgcggtcatgagcttcttcgaggccttgatctgcgaagacgacagggagatcagagcctggccgaaatcgccggtgtccggatcgatgacgatgacgtaatgaccacgggtgtcggcgaagtagtcagacttcttgtcgctgaccgaaccgtcttcgttcggcgcgtacaggcgtccttcgacttccttcaccttggtcgggtctttcatcatttccttgaagtcttcgacgctgatggcgcccttgaaaccgccctcggcctcgcgaccggcccagcggatgaactcgcggcggtacgcggccggaatgatcagcaggccggtcttgccgtcgtaaatcttgccggtgacggtgttcaggaacatgccggccttcgcgccttcgatgtacttcgggtcatcttcatcgacctggggagacatcttctgcagaacctggatgaaggggatggcataggactcggcatcggcgccttcgaagcctgcgccgtcatacgatcccaaatccatgaagtcgggaacttcggtagttgcgacggcgccgccaccggtggcaactgctacggccttggtttcttcggttgcttcggaagtttcggttttcttaccagccatgttaggctccttgtttgtcgaatttcagttatcgctaactgtgggtttataataacggaagttgcaactaagtaaagcaaattacatattaagatttgctctttttcaccttcggtttcgtgatcttggcctctttgtattcgtgcacgccgatgaaatctggcagctcttcgcccttctccagatactcgcggccgaacgcctggagggtctggtaatggacatcgcggttgatggtggcgtcatagccggcttcgatgatggcctcggccgccttcttcgcatcttccatttcgccgcgaccgaactcggccagaaccttggtcttgatgatgccgtcgttgtctgtgtcttccagccacttccagaacttcgatttgttctcttccttgacggaaatgatggccttcggctcgactttgaccgtgcgaccgtccgccagagtagtggtcttttgaccaagctcctccaacagctccggaatggtgttgcgcttgagggttttcagctcctcttccttttcggccagcgccttttgaagatcgaggatttcgacgtccagctgcgaagccttgtccaccaggttcagcagtcgatggccgatgtcggtggcttcgaccgccatttcatccatgacgccaaaatagtcgatttcgcccggtgcgttctctttcaggtattccgggatttcaagctcttgctctttcatgtccgcctccaacttagtgatgttcccttacttgaactaagtattgagtagatattatgccgcatcttccttgatacggctactgatttacatattaaatttcgtcgcgagtgctaacgtcagcctcaaacactccatcaacgacataacttgccaggttgcgcttccactccaagctgacctggattttctcgtcgatggaatccagacagatcaggtcgaagtacaaaaccgagttgacggtgccgattcggtgatttcggtcttcggactgcatccgcaactcgttgtcttcgtcggtcgtgtagtaaatggccacgtctgcggcggtgagcgtgatcccgatccctgctgcggccgggttgcccaggaacacctggacgcgcttggcctggaaatcgtcgatcaatttttcccgctcggcctctttggtctcgccgtagtatgtgccaaacgaaattccttgggcctccagatacgccttgatctggtcgatttcctgaatgcgcatggcccagatgatgatggagcgctccgggtcttcctccagcagaccctccagaagatcagtaaacacggcgaatcgcgggttgtcttcgggcggcaggatcaccggctcgccatagacgttgatatagccggatgcaacttgcttgagcttcgaacgcgctgccgcagcatcgaaagatacgtccagcatgaagtcttcgttcttgagaacgaagtggtagtcttcttccacgcgctggtaaacttttcgttgctccggcgacatttcgaagtatatgcgcttgtacaccttgtccggcaggaatgggagtgcttccttcttcgtgacccggaaactgtgcggctcgatcagggaccgcagcttgtccaggttccggaataccgggcgcccacgctcgtctttttcgaccagttgcggcggcatggtttgcttcccttccagcttgcgcatgatagcgatcattcgaggatcgtcactgggaaccaaaacggaaaattcggccacgaacgcccgataggatttcgttccaagaattccatcgcgcaagaattggaactgcatgaacaaatcggtaggcgcccgcgttagaggagttccggaaaggatgcgacgggccacggccttctcacccagctttacgatctttttcgcacgcttggcttgcgggtttttgatcctcgtggactcgtcaacaattgcgcaaaccttgaaagtttcaaggaatcgcaagacttcatcatagccagcctggtgattgatggcgtcaacgttgatggcgaagacgcgaagaactttttcatctgcgaacgtctcggcatacagacgatccaagcgcgccctggcctttttggaagtcggtcggccgcgccaatccacgctcaaagtcttgatcgcgacgtgggtgggaatctcgcgcagaatccagttggtgtggacgcctttgggggcgacgatgagcagcgcgtccacgcgcccctgtaggaagaggcgaacggcatcggccaaagtcgtccaagtcttcccggtgccctgctccatcaggtatgcgaaattccgtttgttcagggacgcggccagggcattgaactggtgctgcatggcctcggtcttcatgcccttgacgggatatgttttggctttcatttgttctccaaatcggcgaggaactgaacaatgttatccagtccttctgcatagctcgcaacttccaccaagtcgcggctgttaagctcgaacaaatcgagcatgggattcagcagcagccaatcggtcccgatcttggccaggacgaagccccggccgccccagccgatccgttcccgaaggaaagggatttgcccaggctcgaaacatctggccattgggcaggtggaggcgcgtttcggccactcctccaacgccttgaactcgacccagaactggacacctcgacgattcaggcaaatcgaatcggacataccagaccgccgcgtctccagaaagtcgatcaggattcggccgagcgagcgttgcttaaacgtattcgccgctttcgtttcgcgatcattcatcgccttcgccctctttggaaactttctctgcttgcgctgccagctttgctttttcgcgttcggtcaaaatcctcttgacggccttcacgatgaacatatcgattccgctgagcttccagcctttgatgaggaaccaagagcctgtcggcgttccttcggcaatctgctttccgtattgcagatatttttcaggcctaattctgaaacgtatcggctgatcaaccgagtcgtcaacacacatgatgtcgaggaactgcgactggcccttgtacaccgggtttttcccttgatctgccctcttcttctggcgaatcggttcgttctcatcagacagaacttttttcaccatcttgacaatgaccaggccatcgtctccatcgcggatatcccgaatgttctggatggggtttccggaagttactccaaccaactccggattgtcataagcatgaccccagagcgtgtgagcttcgttcaaatctgcgaattgaacttcagaattcgacagactcgcggcgactttctcccaatcctgaagcgtcttcaggtgggttccggccagctctttatattgagctttcagctccctaagatcggcctttaactccttcagatcggccttcaacagtttttccagttctttgtcttggctgattttcgccgaaagaatctgggcttccagcgctgctacatcagcagccttgtcctcaacatcctgtgccgatatcgggcaattggccagggcgatcctcgcggccttgacgtcatcacgaaggcgcaggaacttctctgccttcgccgggccgaagcctttggcgttcatgatgccgccgatcaggcgtccgtccgccactacccagttaagttcggaatgctccgggtccagggccgtatattctacgccttccttggccaattcgcgaaggattgacacagtttgctggtcgtctttcgccgcccgaagacacgcggccgcgtattccaggcgatgataccgcttcatgtagcaggtccagtacgtcaccacagcgtaactgaccgagtgggagcggttgaatccccaggcgccgaatgtcaccatttcctgccatacacgatgagcatcgtccggggcgacgcctatggtcttggcaccctcgatgaacaattcccggcgcttgttgaagaactcttcaccctttcgcgcagacatggctttccggattgccgatgtctgctcccagtcgaactgtccgatgtccttgacgatggacatgatctgttcctgatataggaagacgccgtacgtccctgacagatattgctcgacctgcggaatggtataggtcacaggctcgcggccggccacacgctcgatatacttggtggccataccagaagacaacggacccggacgggctagcgccgtgatgtggtcgatgttttcgaacgcggtgatattgatcgcgtttgcgaccgaacgaactgcctgcccttcgaactggaaaatgccggacattttgtcttcgttgagaacatccaggaccgccttgtcgttcaaaggcaagtcgtacaactcctgcgcagtcacacagttcgcgtcctggatgacgcccagagttcgaaggccgagcgcatcgatcttgaggagattcaaatattccgaatccggcttatcgagctgcgcgacgccttcagaagttaccgtacagaagtcgataacttcatcgttgcagaccaggatgcctgccgcgtgtacgccagagtgggatgggtgaatttcgaggtcgcccatgcaggcggacgcgatctcatacttttcgcggaagtcgcggccgggctgagttttttcgaaagtgtcctccaatccttttccatatcgttcgtccgccgacgtatattcaatgatcgagtttttgatgttgtcggtatcgtggaaggggatgccgaagcgctttccgacgtgagcgataaccgatgcggccttgagcgtgttgatgttgcccaacttcaccacgttccaagtgccatacttctgctggagatattcgaacactagatagcgatgggtatcggcgaagtcgatatctatatcgggaagatcggaccgggaaatgtcgataaagcgctggaagagaaggcgatgagggagcgggtcaacctcggtaatgccaaggagatagcagaccaaagagccggccgaagagccgcgagctgggccgaccagcatatgcttcttggcgaacgcgaccagatctgccacgaccaggaagtagctgtcgaaatctttcagctgaatctgcttgatctcttcttggaatcgatcctcatactcctgggtccattccttgatgtggccgcgactgagacggtaggcttgcccctcgcgagccagcgcgacgatatccccatccaggtggatcataggcgccttcgccagtttcacatccgccaattgttcgactaccgcacgagtattggcggcggcggcatcgaactcttcgcgagtcatgatgtggcgtaaacggctccacaactcctcttcggtggcgatgtggcgaaggccgaccgattcccgcaccttccaggccgacgcgaaatcagcatggtcgatggacggcatgtcgttgtaagaggtaattaccaccggctttccgaatgccctggccgtctccatagcgccgtgcgcggcgaccatcgacgcgggattgatgtcaatgtagtcgattccggccagatccagatgggcataggcctcgccagcgaatttgatgacgccgtcagcttcctggaattcttgcggagtcaatccttgattctggaccgacttggaagtcaagcggtagaacttcttggtgtccttggcgagcacccaggctttgagcttcagctctttctcgccatcgtcggcgcatttgatcgggatttccatgccgaatccgcgaggcagttctgccttggtagcggcttgttcccaacggacgtggccccatgttccatcatcgacgatggcgacgaatggggattcgatctctttggcgcgctcgatgatctccgggaatcgaccatatgcggcgccgtaggagtaaccagagcgaacgcggagctgagggaaagacatcatgcggcctccattgcttgatacgcccgatacactcccatgcgcttgcagacttcgtggagcagccgcacgtcgtcgagcgcccggtgtttctgtacatatgggccgcagtagtgctcataaagatgttgcagccgcatgcggtggccgaacaacggcgccgactcttccacagtacagatatcgagcgatgggaaattgacttcgtccaggccgaacttgccgcgagccagatcgcaggtcagcatgaacttatcgaatggcaggttgtgggcaatattcgcgtcggctctggaaaagaagtcgcgaactttctggcgctgatcgaggaaagatgggtgcttgaccaggtcttcgttcttcaacccggtgatcttggtgatgatttcctcgataacgattccaggattgcagatgaactctacttcatccaaaatcttttcgccatcagttatcacgccggcgaattcgatgattctcggctgctttctcagactcaccctttggtggaacgggagtcctgtggtctcagtatcccatacagcgaatatcatgtttgttccctcttatgtcgaaaggccggctgctttcgcgaccggcctgaggagtataccgcgacggctgaagatttacgccttctgtccgtctttcggcgtgatgcggccggagcgcatggtggcgtgaacaaacgcagaatagttgatcgagtccaaggccgaatcggcatccttgaacccgctattcgccaggcgagtgagtttacccaccatgtgcatcacgaacagggcgagtcgatgatcatcggcggtcttcgccaccaggccgttcgggaagaggatttccatgatctttccgtacatcagatcattgcgaccataggtgctctggcgggcgcggaagacttctgctgcggcgtacagattgttgagaacatcttccgcgaaatcatctggatgggaatcatcttcgcccggccagacggattccatggcgaacggcgcggcgtcttcggtcgggtcttcggactgagccgtttcagcgagcggagacggggctttcgcaaacgcctcgtcgagggtaggggcggagttcggggcggccgggaacggctcgcctgccatgtcgttgggcgcgctatcggggtcgctatcggccgcgacggcgaagaacggcgcagcgcaaccttccaggttcaggatgtaggaatcgacccccaggctgttgtaggcatcgatgatgtcctggcgatcatcgaatgccgcgacgatcttggtgacgccttcgattttcttcaggatatcgagcacaactgcccgcttgaactgaggcgccggctcggtgttaccatacggccgcatgatgagttcatactcgcgatgttcggcgatgccgagttcgcggtggagcttggccctggtctggaaaaagtggttgtcggttcggccggtgacgaagaaaatcatgaggtcggcgtcgatggcattcctgatgcgacctacagcgtgcgggttgagagtgtccttgtcgagacgagaatgatactcgtcccattgccgttccaaggcgaagctcttgcggtggctatcgtcgaatacgcagccgtccaggtcgaagatgatgatgccattctttggtttgcgttccatattcagatttccttactggttgctttctgggtgacggttttatcgatgaacgtcccatcagaagtgaggcggaaaacttcgccattctggatgaaatcgaacgattgcacgttcatcgtgatgcgaatggattcgctgccgttggtcacttcgacttgtgcgatgtcgccaactttctcgacaatgatcttcatgttacatggacttcccattgacggccacagggttggcctcttgtttttccgatccccagaaatcgcggcgcagttcttcctgctcggccgagcgatccatccaggggcgatagaacttgcactggtagataggttccaacggaacatcaatcacaggaatctgacctggcttcgtctccagagcggccatgaaccggtcataggatttctgctggatttcctcttcattcatcaccttcgacccatagcgcgggaaggcgcaggagccggtggcgacgcagtgcggctggagcaggctgtcgaacataggatagacttccagaaccagccggcgcatttcgcggaatacttcctgatattcaccctgggtccgaacgcacaggcgaaccttcgccatgtcgctgagagtccgcagattgaacttggccgcgatcttcgtttccatgttggaaggaatgattgcgcgagcgtcctggagcgacgcgccggcctccagcagcttctggtaactcgtctgcgcgtctgcgatggcgtcatgccacaggcggttcagctcttcgcggacgtggtaggtcgggtcaggctcgccatttaccgtagccggttcgtcgaattcccagcggaaagcttctggttgaacgacggcgctgatttccagagcgcgactggtttcctgctggtaagccccggtacgagtacgaacgagttgatgggtgaaattcttgctgacaccctcgatctggaaaatgaagtccacgaactcgaacggcgagcggatggtgtccagcatgtacttccagtggtcgagcttttcggcctcggtcatggtcgccgggtcttggccgcgcatgcgggtggacttcgttcccaggagcaattcccaggcgttctgggtgtaactgatcagagaaatcttcatcagaaatcttccggaattggcgtgaagtggaatttttcggtgagagccagggccaggccttgggcttgctctttacgaaggccatactgctctatctcttccttgagcagttcgcaggcctccagacgcgactcatactcttcagcctcctgaacggacgagaagacggttccatcagaggttcggtacacaagttcaatcgacatggcggcctcagtagcagcggatgatttcggcgcggatgtcgcgacggtcgaggtagtgctcacgaatcttgtcgcgggcacgctcggcctcttcgcggctgccgaacgacaggttgaacgacgtgaaaggcttatcgtccagttcagcgccggtctgatacaggatgcctaccagaacgaaagacggcgcggtcttctgctgcggcgagtcggcttgcatttcgaggaaggacataggaacctcttcagaatgatctggtgcgtaaattaatagcgctcctgctgagcagctacggtttccggctcatagatgagcatgtcaacgatttccgggcactggcctttcacccagtcgatggccgcgaccagtgcggtggaagcggagaaagaaaaagtgcggtaagactcatggatgtacggcgaccccatggaatcgcgctcggtcgtgcgcgaaatgactgctttgatattaacgatccggcccatcttcggcctccactttagcgattatatcggacaggcttaacttctcgccattcaggaaataactggcgcgaaacttcctgtcgccctctggcccgacgattcgggccgttatggtgagactcccgccgccaagggcatcggtgtcccggaagaaagtcagcagcgcccgcttgagcgctgcttcgcgaggatcgacggccattaacctaccacgttccagccgtgctgagcgcaccacacggcaccggcccctgcaggaagactattcagaaggaacacaggagtcaggcggccgtcctcggtcatatggatgaagtagcgggcgccttcaccgagccattcggccttggcgatagcgcgttcgagattggccttggtggcgtaggttttggtgtggttcttgtcggtggagaaggttacttcgcgggccatctgtcgattccttttggttgaagggtttcgcgtttcgatgagggaatattacgcccacctgatccagaagtaaagcacttttgtaaattacttcacgaacatcttcttggccttctgataagacgaagaagtcatcaggcgctcgatgacgtccatgtccgaaaccagatcatccagaaggacattgcgccaggtagcgaaccggccgagcgagaagatgccagcctcatgggtgagattccagatcatggattcgcgctcgtcgcgaccgagcggaatgattttgcctttggtctggatggtcggctcgccatcttcgatgagatgccttttcctgatgccgaaggccgcgcaaacgtaatccatatcccagtcgctgtcccattcgatggtttcgattttaccatctaaagtctccactatccccttagtgatggattcgacgatcagagtatcaccggtgatggacgctcgaaacgttcccactttagggccagggaaatacacggtctggaagacatcacaagggatggaaagcttgtatcgactcacgatgatggatgttccttcaccgaatgacgggtcgattcccaggtccagccctgccgcagccagattggcgcggaacggcgcggtgctgatgatattcacgtagtcatcttgccggcgaagatactggaagaaagaggcgtcgaaaggacggctccaagtgatacgattcgcaagcttagccaccagctgctcatagtagtcggccggtgcgatccaacgcttttcagtcgccagattccagatggaccggtccgacaggccgcccgttactttcctggagtacatgttgcagtggtcgatacgcggctgggaaatgaactcgccgtcgatgtagatagctttgtgtacagtgacttcgcggaacgggatgccggtgagttggccaatcactggcgagcggaatcgcagaagtgcgttgtggcgctccttattctccggcgtcgccgcgtcgatgatttgggcttgaggaaagcgatgcgcggcgatcagtccggcgagtccggcacctacgatgattactttctgatcaggaatcatgatgtgtcccttatgagtgtacaaaacttgagaggataaaaaagggacccattttcatgagtcccttgaagagctagacgattcggtctcagaagagcggcggcttactcttcttcaccagcggaaccgtcggcgccctgaccttcaccgtcgtgctcctggccttcatcggccttctcgtcatcgccctggccagcttcgtcttccttcgaagcgatggcaaccagatcgacccagcccatgatttccagcttgctcagatagctgcgaaccgaggtgccgtacagcaggtgggccaccttctcgccgaaggattcgatttcgaccggctcaccaacggtgcagtgctcgttgatgtaagcaaacaccttgccgcgagtcgagaaggcctgcggggttccatggccgtcgccggtcgggatgaagtgagtggcgcgggggcgacgcgagccgttggacttcaggtcttcgcggcgggcttcggccttcgcgcggcgctcttcctgctcttccttgcggcgctgcttctcggcttcgcgctcagccttcttctgctcggccaggcgcttgcgctcttcttcgcgagcgactttctgagcttcctgggcggccttcttctcttcggcctttttggcgcgctcggcttccttctcggccttcttctgctcgcgctcggcttctttggccttcgccttctcggcctgctcggcttccttcgccttggccttttcagcacgctcggcttccttggcggcggccttttccttcgccttctcggcgcgctcggcttctttcttctcgcgctcggctttgcgcttctcttcgcgctcggctttcttctgctcggcttccttggccttggcttcggccttctcggcgcgctcgcgctctttacgttgacgctcagcggccttctcggccttgcgcagggcggctgcttgttccttggtcagctcttcgccttgggtctgctcgttctggtctttctgttccatgttcttactccgggaatgtttaaagggatggcttattggcctgtgaggggattatctctaaactaattgaagaagggaataccttagcctgaactttcctaaatattttctttcgggaaagtccagaatctagggaacttatttatgttcgcgaagtttcaactcttacgcaaaaacaacaagtattcaattgcacgagttatgccagtatacatcaactgactataaggaattgacggcaagttttcttccaacatggcgacccgtttccattccgatccctgcgacttatggaacgtcatcgcccagccgaagtcgaatccgccaatggccttctgcgcctccaaccgcacatcttcctcgaccgaaaagctcaagggattgaacttcacccagcgctcatagttcgtgccgataatgcgaactttggcaaacagcatttcatccggctcgtcatcatcttcttggccttcggggaccggcttgaagtccagcagaattgcttgctcgccgttcatgatgccatattcgtgctggttcccggtgcacaccagcttctcgccgatttccggttgtacacccttgtagccgaggatgcggcgcgccctggcgttcaaacggcggcgagtattgttgtaggcgcaaaggatcacgccgtcatcgtccaagaacgtccgcatttcgtcgtccgacatgtcgaatccggcccggaccagaatgtcgtcatactcgcggcagggtaggcgcttgccctggcggacgaacatcgacgcccgaacgatattgccggcgttgcgctcgatttcggtcatgatggtgtcacagctgttctcatggaaaatctggacgccgcgcacaggaggaacttggccaaagtcgccaatctccagaaccggaattcggtgcgacagcaagcgctcttcatcccactcgccgatcatggacgactcgtcgagcacgaccaacttcggcttctcgtcgagcgagtctttgttggcaaacatgatttcgccgtcttcatcttcgccaatcggccgatagatgaagctgtggagggtccgggcattggtgcaacccttctcgcgaagccgcgctgctgctttcccggttggcgcgacgaagaccgtccagtccatcgagcagcaaagttcggcgatgatcttcgcgatggaagtcttaccagttccggcgaaaccagcgagtcgatagacctggcggcggtgcgctcgatcacaccaaccgcgataccagtccacaacggaattgatcgcgtcgatctgctgactgtttggtcgaaagccgaatcgctcttcgatctgatcgacggtgaagttagatgctgacatatttgcgttctccaacgctaggtttaattgaatcgaggctcagtttaagcacgccgtccacagaccatccagtgtcacgacgatacttgcggccttgcggatcgacatagaagttcttcgtgcgccgcagcagaacataatgccaagcagctccaagcgcgtggacccttcctttatacgggaaagccttcgcctgctctgcggcctctttggccccagggagccagcggacggtcgaaaggaccaggaccgcacccttaatagcctgggaagcggcgcggccgtcctgtgggctatagcgatgtctatcgaagtctacccagtggtggttgccgcgccggagcttgaccgttcgggatcgcccctcgaacaccactgcgccttcgtgagtaaaaatatgttccgccatcgaatgttcctttataacgtacagttatgctttacctctgcgcaggaagagtatactatcagctgactcgccaaagcgagcgaatttaatccaactttacttcggcaggaaagtggccgatactagcgccgccgcctgtactgccctccaaaacagaggatacattaaatgcaagaatgcaagatttcccgcgaccaactcccggtcggtaatccgaatccaaatgtcgacaagacccgcgacccgaacctgaagcccggtttcctgcgccgcagccgcgagctggacccggcgctggcagttcgcattcgtcgcgagctgatccacgccgaagcgtccgacttggccaaggccggatgggtcaattcacagtccagcctttatggatcgaaagccttcccgcgccattccgtcgttcgcgtcaccggagttccggaagatggagctttcatcggcatgctgatcggcttcatcgagcatcgcgagcacggcgaatgggcggtcatggaagccggaacgaaagaaggcggcgccgtcatcattccagtcgatcacatcatgcgagcgtcattcgccgaagccgaagagttcgccgaaaagtgggagcggaacttggggtggcgtctcctgcgccaactccgcgagtgcggcgccctggccgggactgaagacgagttcctgcggcggatcatcaatcgatacgttcgtgatcgcacgatcctcgatcaccacaaagtcggcgcggacaaaacctatactgatgcagtactcaaaagcatcggcgaaacatggccgaaaattccttcggggaaattcgtcggacaccgagtcgcgcagctcctgatcggccacaagctaggtcgagcggggaccatcctgaatgacctggtggacttcctggagaagttcgcggccgggcgcgataaagttctcaacatcaccatctgtaattgaggtgaatgatatggaagatttgggaaagctgagtccaaagctgagtcctcggcagcatgccgttctactggaaatgtacaggcatcctgagcatccagttcacagatcgccaacgaatttgactcttaaggctttgagacgaaaggggcttgtcgagctatcatggaaggattccgtggctggatatatgttcggtcgccaaccttgctggaacataactgatgccggcagaaggcgaatcctgggagtgctggggaatactatggacaaagagcaaagcgaagatcgcccaagcatccctgagtttgagaagaccgacgccaacaaactctatgatgctctggagacgatttcgctgctggagaagaagttggacgaatccgaaaagcgcgggagcgagctggccgcgagctattgtgacggcgtagtcggcgatgaatacggccatacttattgtcgttataaagtggaacgcgacgccgccttggccgaagtcgagcgcctgcgagaatcaaaaggcgatccctctggcagcttcgacaggtgtatgaagatgatgtacgagcgcgacgagaatgcaaaacgactcgacgccgccttggccagggtcgcggagctggaagggaagttgacggactgggtacgcgaaggattccgactcaacgaagcgctgacggtcgccaagtctcggtacggcgcgccagagggttatgccctgatcccggttcgcgagacggaagcgatgcatgatgccgtaatggcgctactggacaatggcgtcgcccgcgctgatacgcagaagctgctggacgcttacatcaacgccgcgactaacaaggagtctgtgtaatggaaccgaagaaaccttcaccagtagatggagtcatcatgaccagcctcgacgttctcaggaaggcaaagcctgaagctcaggacgagtatgccctgtccatgttcgcaacggcgatccgccagaaactgcagcgctcccgcgataaaggccgaggcggctggatcgactgcgacgaagatgttctgatcaacggattcgccgaacatgcgctgaagggaaatgagaacaacctcctggacctggcgacgttcctgatgttcatgtgggtgcgcggcatcgatgatgcgaagattcccccggcgctcgaaaaggcgagacagcacaagatcatggaagcctggagtcgaatccatgaagacggcctgaactccgccagaaaggcgagtgctgcgcgacagttcgtggaagtgccacgacgcaaggggcgcccggagcgacttgcatgaagcctcacgaaataagactggcccaggccgaagagttcctgcgcgaactcggccgagggattccggacgacgaacgggtgatggtcggctacgctgaagaggccacagtccaaaccgacgagaacggccgcaagctcaacgcaggctggtggcctgtgccctggaaggaagggaaatacatcaactccagatccaacgcctacgcatgcatctcgtcgtccatcaagacgcccaacccgaagaccggccagatgcgatactggcgcggcgaagcctctttcggccacggcctggcgttgatggtcgatgacatcggctcaggcaaagggtccaagggtgacttcgaccgcgacgagttccgcgagcgactggagccgaccgcgattgtagagacttcgccgaacaactaccagttctggtatttcttcaaagagccgatgtcccacatgctccagttcaaggcgctgctctattcgtttgtggaccaggtgctaaagaaaggcggcgacaacacagtcaaggacgtcagccgttacggccggatgcccttcggcttcaacaacaagcgcgggaaagacggcaagttcaaatatgccgacgaaaacggcaagcccgaactcgtgcgcctgtacagcgccgactattccaagcgctactcgccggaagagatcgcccaggcattcggcgtccgcatcatcatgccccagatgaagaaggtggagataaaccgcgacgattgggtgtatgaccaagtatggctgaagtatgccgagcacatctgcacgaaatacaagatgggcgaagcgtcaggcggccaggtccagcagaatatgtccggcaaataccgcatccgctgcccgtggggagacgagcacacaaatggcgatccattcggcgcctactttcgcggaccgatccctggagccgagcacgaatatgtgttcggctgcggccacgatacttgtcgcaaagagcatcgccggacttgggcggccttcacggatgaggtcgtgctaccctatatcgtcgaacaactggaaagaatcaaccgccgtcatatcggtgaggagtagacaatatgcaaaacgatcctggaatcctgattaccgccatcggcttgctgttcctcggccttatcatcttcttcgaaggcctaaagggatggaaaatacaagtcgcaaacttcctcgcgtcgcttctgtgcttcttcttcggcctttctgctttgacgttctggttcgtcgttgcgtttgacgtattttaatcgacgaacggtacagaaattttcggatggggacggaacttattagctatgccggtttaggtaggagataatagccgtccctttcgcctcaatgtgtagaggcaatgttgaatccgatcatgtaaagcagaaggcggcaaacctaacatgattatcgacgaagataatatttttgatgatggcgaatcagggtccagtgagtttgatctcacgcatatagaagatgctggaatggaccctttgatgaccgccgcgagcaaggcggccgatgatgcgattgcgaggaatgagacttaccgagcgcaaaaggcagcaaagtatgcagaggcgtatgcggaaccagatttgaagaagcgagcgcgattgttgatgctcgatcaggcctttgatcttccggtcagccggctggtgaaaggaccgttcgacgacttcatcaccaagtacagctcgacttcagacagcaactacctcgcggtctatgatacgttgttctgtaagggcgacggaactgtcccacacccgcacttcgacgagtttcgcggccggctggtggaccaccgaggcgtggcgttcaacaacaaaaccctcgatccgattgacctgatgggcgccctcgcggctgcggccttggacgatccctcgattaagaagacgattgagacttgctgcgtttgggcgcgtcgatatcgtcgcaactctttgatcgagacgtttgagaagaagataccggattgggacggcgaagagcggatcgaaacgctgctgatcgacttgttcaaaccgttcgacaccgagcttaaccggatggtgagcaagtatttctggctgagcttgtactgccgcatcaactaccctggaatctcggcgccgatctcgttggcgttgattggtgggcaggatgcggggaaatcatatttcggcttgctgatctgtaaggagctgtccggtgggcgcgatctggctccagttcagctcgacctgagccgacacgaccagacgccgttcctgcgcaacatcaccggcaactcggttattgcgaacgtcggggaaatgtccggcttcaaaaagggcgacatggaacgcatcaaagaattcctggtgcgatcttcggatacattcgatcaaaaattcgagccgggcgaaacgatcaagcgacaatggatcaccatcatggacggcaacggatacgatggactccagcgggacgactccggcaaccgtcgattctatccgatgttcgtggcacaacttcccgacgaagatggaaagccgaactgggttaagccgggcgatggtaatgaaccgttcaaggtggacttcacagacttcggccgcaagttctggcaggctatggctgagtgccgcgcctggatcgaagagcatggcgtcgatggatacctgaatatggtgtcggaagctaaccgcgaagtgcagaacttctctatttcggaaatggagaatgcgcgtggcgtggttcgtgatgatacgattgacatgtatctgatcaacgttctgataagttgcgagttcgaagaggttaagccgggcaggaattcaaagaatcctggatggagggctgacaccgtcaccattctgaaatggttcgatattctcgccaggaagaagccgatttctcgccacttaactccgcacctgaaggcgctggggttcgtcccgaacaagaacggcctggctggttggtgcttacctgtcgataaggttgcgcctggatggacgaatggcatgcacacgacgttgccgccgttcaatgatgcgcttgtgtacttgctgagaaagggcgacccggatatcactgatgaggctgccatggcaaaaattcgggcagtccgggccgagcgagccaagattttgggcgaggatttctgatgtagtggtggagtgtacttggactaggccgccttcgggcggtcttttctttggtgcggcgtacattagattccggcgttgggcgggattggtagaagtgaatacagtaatttggaccagtttcgagcgcgaataatggaaagtcgatagattttcggtatcggtttagcgtgtatggtggatggattttgcgtgaaatgttgagaaattgcgtgtttgaggtggtcttttcgtgggaaatagccgcaaattactgtatagcgattctgagcggtaatttgggaagcctactgccgcgtgggttagcgggccaatttcctaatttccggtttttcgagcatgggttaaaactattctacagcgaaaatcgattgcgcaatcctaatagaaaaaatctatcacggacgttacctatctttaaaattaataaaattaatagtaatttggtaatttggtaaactttagtatttgaaagcctcgcggcactaagcttgtacatatcccgtcaagtttccgattccagcccgctcgcggcagggtcgccggaaacttccggacttccaatccatgggtcgcggcaacaccacggcggactaagcggcaatggccaaaactcgacgaacggaaccggaaatttgggagcgtgacagaatcgctcagctggacatatttctaacattcgatttaacactcaatccaaacactcaccaccatcgtcgcccaccaaccgccgactcgatcctcacccaccagcggatcgcccgtataacatcctataacaccacctaacactcattcatcatcaaacccacccagacctacagcccacccacaagcagcccatagacgcgatccctggccccatagtacaatcgcgccatactcagtgtcgcgacagagcaccaggccccatccaccaaccgagccaccgcgacgactccagaatcgaactcagggacgcagcaccaaatgaccaaattctacagccccgacgatctagtcacgccacaggaattcgcagacccgcatttcgcggcgatcaaccaaaagcgattcgacctgtacatcgacctgcgcgtccaaggttacagctcctggcgggtcttccgggccatctggggcgaggagcatatggacggtcccgcgcaggcccgcatcttcgcgatggagtccaacccgtactatcgcaagcagttcaaggccaagttgaacgcgaccaaaacgtccgatttgtggaatccaaagacggcgctccacgaactcctccaaatggttcgtgaccccaccgtcaaggactccagccgtctgtcggccatcaaggaattgaacgttctggctgaaatcacgttcgtggacgagtcgggcaagaccaggatcggtcgcggcctggccgacttctacgcatcagaagccgaggctcagaccgccaccgtcgctgctgcggccgaagccaatggatatgtgccggaaggcgaagagggcgatttcccgtccccgacgccggaaccgaccgaggaagaccgcgccaaccccatttagacataaaataacatcgttctaggcccgaatcggaccgaactaaggcgacggtagcgggaagggacgaaaaacgattctagggcggttctaggaagtcggagcctaaccctcagaaacgacaaagccccggactctagctcagaatccggggctttctttttgggcgccttattcgccagcttcgatgatttcgaagttgtatttgacgccttcgtgctcgaaagtcattttgccagccgccttcagctgcatgcggaagcggatgtgtttcgaagaaggcaggccgaactcgatgaatgctgcgttggtggaccggaactcgccgcgcttgcctttgacagtcacagccacgccatggcgctgagtgcgtttcttggaaacttccgggtctttccaggagttggcgatggctgccgacaggtctttggactctttggctttctccggagcgttcttggcctcttcgcgcatcttccggatttcttccagcgcttcctcttcggtgatctcttcttcaggcttcagattctcttcctcggccttctcttctcccttcttcttggaagtgcgggttttgtagactttggccggggcttcctcttcctgaaaggcttcttcctcggccggcagagcattcaggatggcgaggcagcgacgctcagcagtcttgcggtcagagaaacgcttgacggtcgcatcggcgttgtgggcgttgtagaaggcgaccagttctttcatttctgcgttctggatgtcgccgaaggttttgatggagttggtcatttttgcgatcctctgttttggaagatttcgttcgggcttcggtttgtcgccccgttgaaagagattatgcctaggtcgatgctgcgtgtctacatttatttcagcagaatgatgatgaacccgacgaacggttgtcggatgtgaaaacaccgcaggacaggctgcggtgtttggtgggcgagggcgatggtcagaaagtcgggactgtgatcggctcgattggcgggtcgccgggcttgtcgttgtccgatgcgggagctggactggacgggatcgcgccggaccgaagccccagcggttcaggccgcctgcttacctgcggagctggaggcgcaggcggagcttttggtgcttgtggaactttcggaactggaggtgctggcggagacatcgacccttctggaagatctggaaggctcggcaccggatcgacgccaacgaatggctctggaaggtcgatgaggctcggcaccggatcgacgccaacgaatggcctggtgacgcagcgcatgttcggatagttcggcagattgttcaggacgatggagtccgcccagacatacgggtttttgtggttgccgggtccgtggctgatgatctcggcaggaatatggccgttcatggtgagccattccgccatcccttgccgagtcagcgggcttaccacgatctggccagtagactcttcggcgacggcgaacagatcaccgagcttgaacccgatgattatgtagttggacctggactcgccgacgaaagccagggtttcgatgttgtggtggatatcttgatcttcccagatgtacagcatggcgttactcctctttggcgaaattgttctttcgaaggtagtaggcgatcttcagtcgcggccagaacggcgtcagcgccacgttgtcgtgacggatgatcgcaaagtggtccgttccttccaaccctgagatgaagcagcgttcccaggcgctcccgctgtagcgatcatctggcttccagacgttcatgcctgagcttagttcgctcgactcccatttatgatcgatcttgacgttcctcatggcgccctcaataaggctgcttgttgtgttcgaccagagacataccggccggaactttgaagcggacgtattcgatcatcatcgccgttcgacgccgattcgtgccagactcgtcattaacgaagagttcgcactgatgcggaatgactcgcgtcaccaggccttcgcctttcgagccgtagaacttgatgtaagctgcgacgcctcgcgtcatgctcagatggatcgtttcgcagagtcgctgcgcggccgacgcgctggacagatcggtcggactgaccgtcacccagtaatggccactttgttctttatcggacataaactgccctccaatgagaaagcctctgcggctcggcagaggctggttgttgttagtcgcgcttcaacagaacgactttgtcatatgcgcgatatttaccgcgccagtcttcccagtagtcgccggccgggcaggtaagctccagggtgatttcgtcgcgccagcattcgacagaaagtacaatcgccttgttccttgctgcaccctctgcggcatctgctctgagcttaatcagaatttcgtcgccagttttcagctcatcaactctcacaactttggccatgacacactcctgtttgaagaggcgcggccaggacgatcccagccgcgccgatggattaacgtttgtgaagtatggacacagtgtccacgtcgaggatgctgatggtacggcgacggcgcggattgctgcgctcatgaatgcgaatcaggttcgcggctggagcttcgtccaccacccatacgtcttccggtttctgcgtccggagcaggaccgtcacttctgcgttctgggcgaggccgttgcagatgaacgtgaacttggacgagggagttctgtacatgtcgagattcctttttggacttcgggtccggcttttcagtcggtgaagagattatgcctgatcatcaccgtcgagtaaagcacttatggaccaattctccagttaaatggaaccacagcgcggtatcgctgatcgctacgctcccacgccatggcccttcttgcttacatacttcgaaccacaagctgatttccatccttgccaggactcggccgaaggattcgagccggcgccggctagccaggatgtcgacattcaaccgccgattgatttcgtatcggcgaccgttgatgacgaagactaggcgtagggtctgtccgtccagacattcccagtatttggtttcataccgaagccagtagcgcttgccagccgggcctaccatggtcatttaatcgatgctcctggccgcgccacgcggtccggttggcggcgcaggatcgaaccgccccaggatgtagtcgggccggcgcgcttcctgaggacacacggcgagaaggcgccatcctgcgtccagggcatactggagttcgtccgtgcaacagtcttccttgagcaggagacggttgacgctctggagattcggaccagggatggccgagctggtgtgcgagttccagccttcgatgccgtgcaccatctgcggttggttgatgtagccttcggacctgccagccaaccggctcgcggccagctccaggcgttccaacatgggtcgcagagcagcttccgggtcaacgtcgtcccagagaaggaccaggctgatgatggtgtacggatagtccttgtccagatcccaggctgaagcggtcagacggcccaggccgatttcattacacatcacgggaacgtcgttgctccatgtggacggctcccagttccgctcaccaggattcccgattgttacgccttccaggttccccaggagaacgtggagtttgctgacgtattccgcctccagcgctttccgctcttcgtcggtctggttgtggcgatagaaggatggagggctgacttttgcatggtagagtttcatggcggttcctcggtttttgaaggcttgaacgttagagaatggtgtcgcagcatttctcgaaaggactctggcgcttcttctcgcagatcgcgcaggtgatttccaggtcgggcagctcgctgtaagtcttgccgagatacagccagcgcttgcacagactgcgtccgtccgacgtgaagaagtggactttgcgagcattgccgggttgcgcccagccaccttgatcgtttttgcgcttgctcatggcgatatttcctttggatctggaatccatgccgtccgttcgctcacccaaactccgtctacatagatcaggactgacagagcagtcgcgccaaacccgaagcctacatagaatgaaccgggatcgatttccatggtggcgctattggtggcgctattgaaatcgacttcaaagtcgaacatcgaatggccactcataccatcaccatgtcgatttcattgatgaagaaatgaacatcgacaccatcggcgcgaccggtgtaacgcagccgagtcgtcccatcaatgtgggcttcctcgacgccgatgacttccaggatggtgtcgttgcagtaaagcttgacgaacatcttgatgccggagccaatcgccgcgaaggcgatctgcttgtacaggtcttgcttgatcatgctttgcgctcctgtttgcggatgtattctgccctggcttcggcttcgaacttcgcccaaagcgcgttgtcgactggaccccagggaccggtctgagtcccgtccaccggcgcgaacttgccaccggcgcgacgatacttggacagagttctcaggccgatgattttctcttcttgggagtcgagttggacgatcatttgacatacttcccgaagtagcaggtgtggaggatttccatgcccttggagatagccttcagcttgataccgaaattcttgatcgcccagtccagatcgtggtgatagaactcgatgatgttgacgatttgaccggcgctgtagtggatgacgcgaatcttaccattccagcggaaatcttcgcggctgtttacggcttcgacttcgatggtgtcgtttctgccgatggtccatttggagctagtcatgtcgcaatcctctttttggagtgtttcgcgtttcgatgaggtaactatacctcagtcacctcatcgagtaaagcactttcgaacagattatctgaaatttctggaagacagatccatcggctgattcagtcagtggaaccgagactccatccgttgcgggcgaaggccgagcgaccagacagcttgcggcactggatggagctgccatcgtcgaaggtgtaggatacggcccagtccaggcgctcgcgacgtactgccgcagcagcgatatcttccagacgggctttgagaagttgttctgctttggtcatttcgagttcctctttggagcgcttcgggtttcgatgagatgactatacctcagtcatctcatcgagtaaagcacttctgaggaattatctgaagtttctggaggccagaaattgccgccagagccagtcaacgtgatcgttgagatagcgctcgccatcggacgacagagccaggcatccatcctttatgccgagtttggatccggaaatccattcgaactcgaactggagcgttcctgggcgagggatatgggacaggttgtacttttgcacggtcagtagtcctcgaaaggattcatgttggctatggccgcgactttctgcatgccgatgcgatagaattcggcctcttccctggccttgaccatctgctccctggcttcgcacgccagcttgtgctgggaattggcgttcttgatgctgccgtccaggctcttgtctaactcttcccgaagagccttctgcgatgctagctcggcctccaaatcctggattctgagttgaagctggcggttctgctcggcgaccttgtcttcgcgggctacgaagttctgcaggcggtcgacaagacgagtattttcgcgcaccagctgctgtttggcgactttggtccttcgcagttctgctcgcaatgcagacaactccagcgcatgcagatcggcgtccgattcttgcgactctgcggcctgcttattgcgcagatagtattgcccagccgcgaaggcgagcagtgctcggtctgtatccttaactgtcttggccatgaagtgggctcgatacagaggcgcgaacttgcaggcgtctgggtcccaggccagattatcggccacaggccagaatgcgcgaaagcttttcgcatcgacatgcgccttgaccgtctgcgatgcgcccgactcttcgcagatgatttccagagggacataaatggcgttcttgatgcttcggaaagaaatggtggacataacacaatcctcataagaagtcgcggccgggaccatcccagccgcatcgtaatcactcttcgccttcgtccgcgctcagccactcttcgaaggcgaaattcaccttcgactcgacccaatcctgcagctcatcggcgaactcgtcactgtcgatgtccatggtgattcccataacttccatgttccatagcgcggcgttcagttcaaactgcaccatctgctcgccatcgacttccagcaggattcggtctgcgacttcatagtcgtctacatcgaacagatggccgcccgccaggaggtgctggacgaaagcttcatcgaggttggtgacttcgatctggacttgtttggtcattttccgtctccttacttagcggctttgaattgggctttgaggttggccagttcagctttcagatcgatcatcgcctgaccgcgcaggccttccatttcggcctcgctgatcgcgatcttggctgcgcggattttgtcgttgatttgatctttagtcattttcggcttccttttgtttgaagggttttgcgtttcaatgaggagattatgccgaaagtcagaatggaagtaaagcatcttgatgagaaaatttctgcccaccgacgaacggtcgtgctcgaccgtcgatggagggtgtgcataatcgaagtcgcacgacgcgaccggtgatgccccggcgaaccggggcggggtggttaggcggtgcgctcggcggcgcgttctgcgttacggtcgtgcgccatgcgcgcccatactgcggcccagcgcgctttatcggcagagttcggcttgtacacgtcgtcagggtgcggttccgggccgtaggcgttgcagctttcgtcgtattcgtaggtcatcatcttgccctcaaggggtcatggcccggcgaaccgggcgggtgattacttgcgatatttcttaataaggtcgtgtgccatggcgatggcatcagaataggtttctccgccggcctccatttccttcacagccttattgcgcagtgcgttcagcttgttgccgttgatggtgcctttttcatccttggcagcttcgcaggagtcgcgcagagttttcagggcttggtaggtggcgttcatcgtcttgttctccgggtttcgcgtttcgatgaggagattatgccgatagtcagaatggaagtaaagtgtctgaatgaagaaatttctgaacaccgacgaacggttgtgctcgaccgtctgctgcggtgtcgatatactcggcctattgcgaacaatggactgattaa

SEQ ID NO: 15 - DNA, 89226 bp, Nankokuvirus EPa16
  source 1..89226: mol_type = genomic DNA; note = EPa16
gccattggtctctcctctctgtcaagaattctgtaacattcactaggtcacgtcgtgacccattgtgtaacagtcttcagactgtcattcgggcaggggcatttgcccccttcctgccctcctaaactggctggcttcgtcgaagccttcccatgccaccagcccaattatgtaacatcctggccatggtcatggcccattgtgtaacggcattgcatgccaggatcaccagacagtcccagctaggccaattgtgtaaccattccccatcccagcagcagaatatccccagccagggaacctatgaccatccccattgcatcctaggtgctcagcccctggaatacgtcgattgtgtaacccatgccaacccatgccctagtagacctcttcgaggcgagctaatgccggcgtctctctaccctcacgggaagagttccccctttattatggcgaccgaatagagaatgcccgattcatgcggcctgtaggccattacaatggccagcccggggaaggattgcattacacaataggcttaccctcacccctgaattgacaggcctcttcgaggctagccaggctcagataggcagcctgagttacacaattcaccctcacatattgccccaccccccatgccacacccctgacattcaaccccatgccccagcttcaacagatacatttgcttcgacgaagcctggatatttccagatcatgacggcgcctcatggccaccctcgggccttgttgtaaccattccccatcccagcagcagaatatccccagccagggaacctatgaccatccccattgcatcctaggtgctcagcccctggaatacgtcgattgtgtaacccatgccaacccatgccctagtagacctcttcgaggcgagctaatgccggcgtctctctaccctcacgggaagagttccccctttattatggcgaccgaatagagaatgcccgattcatgcggcctgtaggccattacaatggccagcccggggaaggattgcattacacaataggcttaccctcacccctgaattgacaggcctcttcgaggctagccaggctcagataggcagcctgagttacacaattcaccctcacatattgccccaccccccatgccacacccctgacattcaaccccatgccccagcttcaacagatacatttgcttcgacgaagcctggatatttccagatcatgacggcgcctcatggccaccctcgggccttgttaaataccccagcggcctcgctgaaatttgaaaacggatgcccctccccagtcacgccccccaggcccgttccccaggatgcccccagatatattccccaggctggtgcccaggaagggtgccccatgctcatctgaaattttggcgggggtgggtttctgaattgaaaaatgttgacaggcccctgccggggcttcacaatggctccacattcgctgccagataggaggcaccccatggttttgtttatgtatgatgttgaccccggctccctgcctgtaggttgctacggggctttcctgaagactccccacgccatccgtgttgccctgtgtgagctggctagctgggctaaggaaggatgtccccagcatcccgtgtttgaaagacagaaacgaatctgcaacaacgtggggaagtaccttcttacccatggcaactacactcacctggcgatggtgaactggaagctggaatacctcatgtcctgggctgggttttccagagggcacccccttcccttcgagctaggggatgagcgggatgagatgggtcggtattacgagaacctcaacaggttgcatttcctggacatggtggttatgatgtccaagatgtattacaacgatgagatgaagcgtttggaaggagggaagaatgatgtgtgagaatgtgcgttttgtactggctgtgaagctcctccacccaaaggtgaaggcagggttggccaggatggtcaagtggtacaaggaaggtatgcctggtgaccgcaccttttccaagtacatccggctatgctccaacatctttcttgagacaggtgttgagtatgccctggttgatctgttcacagcttacgggctgtccttcacctcctcgtacccgttcgagggtggtcatcggatagaggtccctgaggacatctacaagaaccctctccgggtcaagttcctactggatgttggtgctgtgttgaaggaggaaggatatgattgctgatctgacatatgctcaacgtgttgctgacctgaagtgggcctgggacaggactgataagggtctccaggaggtgctgagggagttcgtagcctggtacaaggccgggtgcaggaatagtgaccgattcacccgctactggcgtatctgcaccaacgtgaataaccactgggacagtgggccctatgatgacttcgaaatgggcaacctgttcatcgctgccgggtaccactacatcagcttcccgtttgagcaaggggagcgcctggatacctcggacaacatctacgataaccctcaccgcagggagttcctaaacctgctccatgaggtgatccagcaggaggcccagaatggagctgtctaagcagttcgttgccaccctgacgggtgtgcccgtgcctgtgaaagaagctctcttcgagcttggcaagtggaagcaggaggggtttcctgatggccataaggtgttcaagaagacgtaccggctgtgcgataacctggtaggtttcctggagtatcggtctctggaccaatccctccttgcaccgtggtggtcctacacgtcagcgttgttcctggctgcggggtacccgggagggtcgtatcccttcgagaatggagaataccttgactgggcggatgagctgtacgataatccgaagcgtctgaaattcatcgacatgtgttgggaggttttgaatggaaatgggtgattatgtgtggaaagagcttgcaccagaagtgaaagaggggctgttggccctggtgaaatggaaggatgaaggcttctccgagcatccttgctttgaccgaagggtccgtctgtgtaagaatttggcctctttcttggaggctaaaggtatgcgtcgggtagaatctatggtactggtaatcaactccatgtcaggtttactcctcgctgaaggttttaaaaaaggggcgtaccctttcgagaaggggaagggagaccttcagcccatgatctacactaacccccatcgtctcgaattcattgaaacttgcaggaggaaactggcatgaccctagacctaaacagagcacctgcttcggctacccactactccgttcggacggactctccctttacaaccttctggagaaaggaaggtgatctgtttacccgtatatgggtagctgatgcagagggtttacgtctcccagaagggcgtactcccaccccttacgagaaagatgttgcgagtgtttatgccaagcccttgccatcccctcctcagggtgtagtggataatcctgtcgtggcttcataccgggaagcgttcagccccgcccctcaggttgagtcgggagaaccccaggcacgtgggaaagtggactatagcagtctggacagctacatctggagccaggccccccttcaggccaacttcttctctctggggctgaatggagagttgagctgctggctgcacatcgaagaaggcaagatcgtaacggtttggacggagcagggtacggtgtataactatcggacctcagaccgccaaccttcggtacctggtccgagattcccccgcccccagaagaaggaagaggcctcccctcaagagtgggacggtgaaggactccctcctgtcggctgcaccgtccaactggtggacatctcttctcctgtgagcccgcctttcgatgagtggttgcttggggactacctggaggtgatcgcccacaaggaggtttgtggaaccgttcgtcctgtcgtgtggaatgacaggaagcagacgggatcgtccatccttccaaggctgattagccctgtgtcccaagagactctggctgccgagaaggaacgccagcaaggtatccaggaaatggtctctttggtgagcagcatggaccttgcccgtgccctggaagtgctgtatgatgcaggctatcgtaaacaggaggacaccgaatgaacacccatgaacgactgctacgtgctgtgcaagctctgcctcgggaattgatcccgtccctgcatgacctggtggcctggtaccactcaggctgcccggatgggtccccgtttaacacctcccgcaggatatgcgggaacgtataccaacacctcatctgcaaaagaggggtgagtcctgaaagggcctgtgatctggaggactgcctgtactccctctacggggccttcctggatgttgacctcagctacgaggggtacccattcgacgacgaagcgacaatctacaagaaccactacgacaacccgctccgcatggccttcctcaagtgcctgtcggaggtgctgtgatgcgactcaggaagattgaacagataaacttcgagaagttctcctggcagactcaggttgccttgaaggagctggctcgttgggtgtttaaggatatggggccttggactgaaggtaagacccacccggccttctaccggggttatcgtgtttgctccaacctccgtctgtgggagttgcattacgggtggggggataaacatggtcggatgatccagacggagttgtctgaagagttcatgcgtgtcggtctgaacgtagacctccccttcgaaggccgtctctcggatgacgggatattcgttctggacgaagatgctgtcgaagaactgtacgacaaccccctccggcagcgtttccttcgactagccctggagaagctttcagagcccaaggcggaggtcagtgagatgctggaagacgcgctcacagccgtgtcccgctgggctattttgaaggagtccttctcctgcttcgaacctcggttccgaatctgctggaacgtggagaactaccttacctggttagggaagagcgaggcagaggtcgccaaagcttatcaggagttgtccaaagtcttcggcgtcatgtacccctttgaaagtgaggaagggtttgacacagaggaagagatttggaagaatgatcgccgactctctttcctggctcaatttatctgaggaggtgatatgcgtgatgtgacgtgctttactcaaaaggaagcccacctgtatggtggggtactaggcatgcaagacctccaattgcacctccaaggtcaagggatgagcgctgacgaagcatcccgtaaggttcgatccctcgtctccagttctggtgtgtccttgcaccactccacggttcgagccatcgcaggctactgctggagtgcggggttcactttcgtggacatcctccctcttctccgggctcacgggttcagccccgcccagtgttgggatgaatttcttcgggtgtggtggtggtgggaaaacagctaccgccaggacatggagagccgttttaagcttatggaaggcagcttgaagcatggatgacatttaccaggtttacaaaacgattggcaaaaactgtgccagcaacgaatccccggccctgctgtaccctacggacgttatatgtgggtggcggcaggccggaggactctggttttctgactgtggcctggaatggggtttcattgaagacggtcctcaagaaaatggaatgaactactgccctaagtgcggtaagacgctactctcaaaaggaggggaatgagaatgcagacaattaaactgagcgacgccatagtgcagggcatgggcaaggcgctttctacaggaaagctcagcgctatgtgtttccatttgatggaactcctaccccacggacaccctgtccaggaggaattacactgctggctggagacttatctacagacgaaaggccgtgattactcctttgttcggaccatgcttgaagttcatttcgaggagcttaacccaggcaccctccttacccgacaagaccttggccacctgtggtgcaacttctatgtgtgggccgtcttcgacatgaagcgaaaaggtatttgacttaaaattacatcccggggaggagcagatgagcgaacgacttcggagactggaagctgagtattcacgtgttgagcgtgaatggggtggcctagccaggtatgagctggagatgctcaggatacaaatcgattctgaaagaagaatcagtgagcgtaactcgtatctgtcaatctttggatgtgggaacgcattccacggaaggaagtacgactagcttagcaggccagacgttaacgtgtactggagggttgacaccaggtagcccctccggtaccttgtcttttcttgaattttaaccgaggagattttaatgaaaacttatgaagcttctgtgctgttcgatgccagtctggcaggctctttatctgttgaggccaacagtgttcaagaggccatccacctgctagaagacaaggtgggttaccactccccaaccttgtgctaccagtgtgccggccacctggaccttggggacatgacgggtatggtggtatactgcgaggacgaagaggtagcagacaccacctacgccggtgaggtcatacgcacgctgaacaagaaggtgaaaaccctggaagaggacctcagcaaggcatacaagctgctgagtgaaatccgtcccagcatccctcaggatgtcctgaagctgtggtgtgaagaccgagacaccgttctctctggcatgaggagtgttgaatgatggaaaaccgtaatgggaccaccgaagcagcttgcccgaagtgcggaggctctggtcacgcggattctggaggtgttcacccttggggtgagcctatcttcatcccctgtgattgcctaaccgagcaggaagatttcctggcatgggccaatgaggagtacgaggttgaagagggctacgagttgaacgaaagcaaccccgccgtaatggaaaacaagaaaggctggatggcccgtgccgccctgccgaagcgttctaaattccgccaacacctggatgagtgcgccgacgaggtggatacttggccctcttataagcgtgaagccctgaagaaaccctgccgtgaacaggcaggcggggatgagcgggagtgcggccaggccgcatgcaagtcactcggcgagcaccacccgttctgcaagttcgtgagcgatcaagaccgcgccgccctgtcgcaaccctctccgccgatcaccccggcgccggaactggacttttcaaggccgctggaaactgcgaacggcgagcctgtgaaatggataggcgcagatgtcatcgagtacaagagtgctctcgtatgcgtcgctaaaaacacgggaattgtctatagttctccttacatcgggctgaagattcgcaacgtgctgccagaacaggcggaggtagatcgaccagaggtggtggcctatcaggcggcggatgccgaaggcgggacgtgtttatcactccgggaagacttcttcggatacaccgtaaccagtaaggaacccctgatgacccttgcccagcatgagcgcatcgtcgaggctctccgattcgaacgtcagcagatggaccgcgctttcactacgtgcatcaacgagcgcgacgccgccttggctgaagttgagcgcatcaaaaccatttccgacaactactatgtgctatgtgtcgagcgccaacaacagttagatgccgccctggccagggtcgcagaactggagaagccagaccctgactacacacaacacccgcagatcgtaggctacgcccacaagaaagagttggagcctttgttggaccagtgtcggcctgatggcagccacatttacataggcctggaccacccgtcgaactgggaagaagagccgccgtatgaattccttactccgctctacacagcccctgtggcccaggctcagcacagcgtgccgggggagttcagcttcgagtatcgccaccctaatggcgagtgccacacggtaacggtaagccgagagcaggtgatcaatgagatgcccgacttcctgttcgaagcgctgtgcagcaagttctgcaactgcgagccggtgggcgagacgaacgttgtcgagtgttgctgcgacgagtacgcggaggaattcaaactaatcgccgccgcgcccggcaaggaggtggtgtaatgggaatctggatggaagttaggtgtgaggaccggtccgaggagtggtccgaaggtcacggctatttcccgcacaggtgttggtctcacgaaaatgaaggaccaatgggagaagctcctgaaacaagggaaggagtgattaacacgtacagacacctggaggaggaagcccggtccctggggtgggtaaggttccgtcacgggtgggtctgcccctattgcaagaacctcaggcctaaggtatagttggcttatctgtcggaccatccactcgtaaggaggattaagaatgaacattgattggagtaaggcacctaagggtgcaacgcactgggagccaacaagtcagaaatttgtcggaggatggatgaagaaagagggttcctcctggttttggtggagcaacaagactcagacttggaatccctcttatctcggtgacccgtctcggctggaaacattccagcccctaccgcagaagacttgggacggccagggcctgcctcccgttgggacggtttgcgaggcaatccacgaagacatcaactcaggaaagccggtaaaggccgagatactgaagcaccacgacaacggtttgtcggtcgcgttcttctgggtcgacgcacctgtcgaagccgaaggaaatctgtactgggcccaacgtttccgccctctgcgcacgcccgagcagattgccgacgaacagcgtcgtaaggacattattgagttggctaacgtcatccgtgatgctggtgatggaaatgattacatgctggcagaggccctgcatgacgcaggctatcgtaagaaggagtctgatgatgactgacatgagagaacagtttgaaaaccgcttcccgattcctgagggcattgaatggcgtaataccgattacttccccgtgaagaccgataacgtcaacttgtacgttattcttgccggagtcgctgctcgctacacgtcgatgtggcatgcctggcaagccagccgagaggctctaaaggtacagttgccggacgacgggatagaggactgccagcgagactggccaaactcctgccgagacaatttcgataccggttactgctatgcaactgaccggatcattcaagccctccagaaagccggaatcgaggtggaacatggctaatcaatacctcagacccgaacagatggtagagcctggctactactggtggttgccagaatatctgagcactagcccagagaagcaagagaactggcagataatctgttggcatcctttagacacgtccagggagcgtgtcggggtattcgtcggacctttgactccacctacggagaccaagttatgaccgatcacgcaaagctgaggaggctggctaaggcggcaactcctggggagtggcatgccgtgtgggaggaaggggatgacgcagcatgggcgaacctcttcccggtaatttatgcagagggcggagagacagtgatcggaaacgaaggtttctactccgacctggaccaggataaagctaacgctcaattctgcgcagcagccaaccccaagaccctcctcgccctcctggacgagattggaagactcagggatgaagtcttggccctgcgcgaaagggttggggttgctccggcccgtctcacgaacggcgacagtatcggcaacatgttgcgagagattggttacgccggtgaagtcagttaccatcatgcacgagaaatttggaactcctgtatcgacgagcaggagcgcctcagcagcctcatggtgagcgagcaagagggaggtaatgatgtcagcaatcatcagtgagtgcggtaaatatcggtaccgcctggatcgagactgttcgccaccctttgagggtagcaaggtgtacgcctacttcggtgttaaccccagcacggcggatgccagtacagacgatgctaccgtccgaaagtggagaggcttcaccgagagaaatggaggccataggttcattgtggggaacgtcttctgctatcgggccaccgacgtgaaagagctgcgaaaagtggacgacccgtttggacctaaaagcgtggattacttccagtccatcctggccgaagctgacatcctggtgccgtgctgggggagcctgtcaaagctgcccaagcaccttcgtgggtgccctcctcaacttcttcagtggatgctccgctctggtaagcccgtcatgtgcttcgggctcacccagtgtgaccaaccaaagcacccccttatgctgggatacgacactcctttgcaggagcttgtagggagctggtgactcttttcacctctacttaaagccccgggccttgacaggtctggggctttgtcgtatctttctttcaacaaacaggaggtggtatgaacggttctagaaaatttcacagccccgatggtccagctttcttcccgggtgaaatatgggtaagttgcgaagggtttgaggttgagattttgaaggttgagcggtacggtaccgacaagtgggatgttgacgtttactacatccagtgtcggtggaaaaatgcagatgatgctgtatttgtgaaggatgcttggaatttccaagtaagatatgaacatcaagcagataggagggtacatgaaaaaattctctgagacttactactcttggtcgggggctgccagccgggcaaaagttcttactgacctgggttggattatctctattcacagggagaaggttgaaggttctaccagtcttgtttggaaattggaggcaacgcgatgagtgagaaaggaatgatcctggcaaagtacactggccttctgtgtggggttaaagtcctccaacgtcaaggagataaggttcgggtaaaggtggtcgatgagaagcgtcccaaatgggttgacttggcttctggctcctacaagctattcaacaatactgatgaagcaatccaatggattgaatccgaggaggtgaccaatgaaacaaactgaaactgctatccgaaacatccaaagaatcttcccgttcatggacgatattcgggcagatttggtcgcggacgttttagtcatggtagggggctatttccccaaccttcggaaatgcagtccacttcttctcaaccagatcgtagttcatcacccagaccttaaccgacaggaaagtcgaatgctgaactcccgaagaaaaacgtatcatcacctggccacactttccaaccagttaacccgtagtgttcacccctcccaggcaaaacgtctacaccgcatagcctctatgctagcgaagtaacctccaaaggcagctatttagctgccttttttattgccctttttcagcctcctttgatcctctatctcactcactccgtacagtctgtagccccgctgcaagcgctttgagaagacttctattgaacctgtacacatccacgcctctcctccttcgtacattatgtaagcttcgtatttcaaacccctgccctccatctttctttcctgcaaaagaaaaccccgccaactttcgccagcggggtttcattcattaggcatcctgcctggtgttatcccttactccctttgggaagatactcctcaggcatggtccagtcatctttcaacagggaaaccgtgagaggaacgcagcattcctgccggaaacagctagtctcacacctgtgatgacagcggcctccatccaggcagcgggttcccaagatttcgtcttctcctgctaaaatgccgcattcagccttcaaaacggaagctcccacttgatgagtctttccagggctacctcgatgtccttcgctctcagggggtcttcgtgcccctcgacggggaatgttgcctctaccttcacatcgtcgattaggcaagctccagggacctttcgtactaccgttgggaccacgatggagacgatttcacacgcgggagcgtaactgtacacctcgaattccgctgaggccccttcatactcattcccttcgggagtccaacgactccacacgtaattgacgacaattctcattcgttccacctcgtctcaccctgggcttttctttctagcatctgcttctcctgagcttcctggaaccgggcctcatcccaggaagacttaccgtcaaccaggattgacgccagaatacccaggattgccaggactatcatcgcttctgtcagggtgaaccctttttcctttttcattcggtctccttggcttgggtgaggagtacattggcttgacgttccatctcggcgatgtgaaggcgctggaagccgttctgagtttccatgggagagagcagtacctggtttgccgggtaaccttcctccggggtttctttggtgtcaggctgaggaaggtagcggcgccgctccagctcctcgaacaggacagccatatctttgtccatctctcgggtacaggtgatcacaccgttgattttccagcccacaccaccaccgtgtatggaagtgacactgacagtgaaagggtcatgtttgttgctcatttgggtctcctgaaggtggatggaaagaacatcttgttgcagagcgtccaggtaggtgcggacctctttgtttcggttggcatgactgtccaggtggctcagatgtacatagcttgcaggacccagccgtgcagccctgtccgaaaccaggttgaacagcttgagggtatctcgcttgagatttcccgacagaactatccaggaaggctcaaactgagggccgtctgcatgatcggtgtacaggtctacggtcagagtgctcatgtcataccccgttgttaaccaggtaggtcaccagttcagtccggagctggatagtgctgggatgaccctgaagggtccaatcatcgtactgcccagccttctctttcaggaagctatacatggcttcctttaggtagccctcgtcgccagtaaattgccgctggcagaagactttcatgccccggacagtatcttgctccaggatgagggtgatcggtcggcttttcatagtatctctcctctttcacgggcttcagcctcaacgtcgtccgtcaagactttctgaaattccatcgtacactggtagaccatctcattcaagattctcttgttgagcctcttgcgacggttctcgtgttccagcacctggcacgcttttggacgttttggaagcttgcctaccaggcagtcgtactgctccacagtcagcaccctacttacctggacacttccaaaaccgtttccagggtcggtcataacttccaaataggagacgtaagctagaccatgaaacgcctcttccaggttgttcagcttcaactccgtcacggctagtcccatagcttatacgacctcactgtcccgcccgagtaaatatccagtgcctttgctgcctcaacagcctcctcagcgctggcccctgccatcatggctcccagggcgaactgagttcctgacccagcagcccgtggcctttcaaggttcaccttttcggagtagatgccgccgtcccaggagataaagtgcagaccatctccatcgagaaccagaccggaaaccttcagctcctggtcttccattccgtcgccgttcacataagcctcagcgagaactttccagtcgcataccgcccctgacagccagaaaacaatgccatccacttctagccgtttttcagcgtcctcgtcggtgattacccctccctgggtgatccttccatcggttgcaatgatcccatccttgtaagcgatggtggtcatgcgcgtcctaccttcttcaggtacagacgaatgagcgggtagctgacaggcagcagcccaacgaggatgaccacccgggcagtccaccaagccagaagaacagcagcatcccagacttcagctccgaggcatgccaagtcctcccggttgaagggcgcttgaaagtgaagcttcagttgttccattttggacatctttttcatgattcctcctatgggcagcagcggggagagcccccgcagtagaattcaccttcctggcagtgtccgaagtagttgggataccctgacctgccgcaatcccccgcacagtctacttcgtctaccattccgttttgtatttcattttcccacaacacctctcgaaggtgtaagggtactttttgccagtcaaatcccattatagcttaccgagtgggctgaggacaggtcccagataaggcaatctttcagaaccagctccgtccgttcgggtccatctaatggaaccagtgcggtcatcgaagtaccgtcagagtaggaatctttcacatgaccgaaacctcccttgaagaggtatgtacggtaaatcaggtcatcatcgaacccttccacccctttcaagtacagcacgacactgatcccacgctccaggtttgagattgcctcctcgaaattcacctgcttcattctccctccttcgcttcaagccacatggcacgggtttccaccatgatattgtccagggttgtattcccgtataggtgcttcttgcagcgggtggcagcaacgtacaggagattctgctccatctcgttcaaacctacccaccgcttcttgtcatcatacccactcggatagtcgtcagccaggacaaccacatcaaactcccgacctttggacttgtgtgcagtcgtcagtacgatgtctgccgagggatcattctcatggtcacggagggccttgaaaatcttccactggtcatccccttcgatgatccggcacaccctgcccagttcgcccgggctctctgcgtattcgtcccggaactcttgccaagaagtgtagcacagtatgttttcgtgcttcaccttcttctcgtcaccctggtacagggcggtagcactctccaacagacggataaagtctcgggtgtcaatctccagtcggacactcttgccttggccaatcaggtttacagcatcccacaccaaggcagcgttggtccgatagagccgggcatgctgctccggaatttcaggcaccccttcggcgtcaccgtccgccaggaagccgttgctctcccataccttcgattccagcttttcccacccgtgaagggcttgggctttgctgttctgtaggatgatgttcgccacttcagccaccttctcaccgaaacggaagctggtggtgagcttgcactctggggccttaatcttggccatagcgttcacgctgccacggaagctgtaaatctgctgccgagggtcaccgaccatgaccagcagggagtcctgctgacgaagaacgatgtccaggacgcaatcgttggtgtcttgggcctcgtccagatagatcaccttgtactggctgaggtcaggcttggagagctggtacagcttcaggtaggtgtcgtggttgatcagcgtctgctcgttcgggtcaatacgcttcttccacaaggcctttgcatagcggagaaccagggcctcatagtagggaaggtctacacggtccttctcggaaagctttgccaggggcatgtagctgatgtgcttgacctcaagctcctcgtctgccgaatactcgaatctgttcaccgtatcgcggatcgcctggccaatgctggaagccgtgacggtgacccccatgtccgattccatgctggcgatcttgaagtagcgggcaatctctgccccggtccccaggacgttgacgtatccccctttagggcggcgaagtttctcactgagcttggccccgaacaccccgtatgccaggccgtgggtcgtcttctttaccacccactgcgggaacttgttcttggcctcttctgccatggacttgttgaaggccaggtacagggaggtaacctggaggcgttgagagaccaggctcatggtggtggtcttcgctgcaccggcccctgcattgattttcaggcggcgattcggacgttgctctgctgccagttcttcggcagcttccatgatgtcccactgctcactggtcggggtgaaactcataaaaattctccttaaattcacaaagcttggggtatgccaacaaggccgccttcatgtaccgactggcttgcctgtcgtcgatgaggagcagtttacggacttcctctgtggaaatcaaggggaggaaggtaaatattttacgcagagccgatttcgacagaggcacctgtctgtagttgcctgtcgtcccgctcacaccctccttacccccggcgctggaccggtaccaatccaggttggcaaccccgtggaagatgttgtccatctccaacggccagggatcatccctctcaaacgcgatgaacgagaacaagggcatcagttggttttccaactggcgccccttcttgttccccttgcgttctttgtcagccctgagccgattagcccgcttaatcagctcatttgcccgggcttctattcgggaatagtcccgtatcggtcctccattctcttgatccattctgttgcccaacctctcgattcctcgttgtgaaggttcgtcacccgaacgccgtgcgccttagccagcttgacggctgtgtttgtgcctccctggacgctcccgtccttgttcgggatagcgaagcatattaggaattcactgggagtctccagatcatcccccagcacctggaagacattcctagtgtggagcttctttgcccccgggctgaggtgttcccaggcaggatggaactgctgggcaatctgctgggctctgactcccagatcgtaggggatatgagacagggagactacagcaccaaaggcatctccatggtgaagcctgtcatagaagccattccacggtatgtagattcggccattggaagtaccatctccatcccatatctgatgcttccaccacccctcttcaaaggcttggtctgcccctggggctccacctgtacggagggtaatcccagcggcggataggtagtaccctagcttgaccatgatgtcaagaatatacccaggagtctcccgtgaccctacacctgtgtagaacagactcatgtggttacctcgaaccctttagattccaggaaggacgtgatgtcgtatacctccatctcccccaaaatgtcccggggatggacattggagatgacgtaatccaagatatcatcatcacccagttgatccagaagagcatcgaccgtagactttacacctgacatctcgacagtcacttcaggtccggaatacggattgtacgttgcttcaacctcgaccttcttggcttcgattaccagttccatacttcctccttatgatttgtagtacacgtgccgctcgattctgagcgtctttttcatggttttcgtccagcggggcatatatttgaccttcgcagggttcaggtagtgatcagcacctcccgtggggtctttggacagaccttttaaagccctccaggccactaccttagattgatcccactgcaccttctcttggattccttcctttcggcttccatcacaagtgtacgagaactggcaacggaagtacaccactcctggaactgttgaaggccatctgtctgggttgttcaccctgttgatgatgacgtgcgctacaccttccttccctttccagctctcgctccgggcttcgaagtagatcgcctctgccagggttctacaggacttctgacgctcgcacaataccttgtaggtttctcttttctggacttcatccagaggttgactgctgaggaccgctcgtttctcaagaagatggaagcgagaagtctcaatgcctaccatgatctcgaacagtagtccggacgcggccaatagagtgctcagacagagcgcttctagggtcttcattcgggctcctttctatcaggtgggtggtatgccggcattgcgccggcacggattacaggaacgaggccaggccgttccggaacacagggaaggcggtactcaggaattcccggctgaagttttcttggcagaacttcacttcatgcttatagcagaagatgacgaagtttgcttgcttgctcttccgagtccgagtcaggaacactcgtttgacgatcttcgtagcctggctcaactggaagccgtaaggggtcagctccaggcctttcagtttgggattagcaggggccaaggtgccgctgcctcgaccagtttccagccacaagctcttcggctcgttgtgaagatcgactgcggtctggaaagacagtgtttgtaggcccttgctcttcaactcgggaatgctcgtatagaagctgcccgactctgccaggaaaccatagcccaggctgcccatgaaacggatcaggctgtccatttgaagccatgcagtgttcttggcggtcgccgagtcgaaagttgtacgatgggtgaatcgcaacagcattttcatagtaaactccttctgtgaactggaggccagtatgcctggcctccttggggttgtcaaccttagtctacgggattgccgttttcgtccatttcccgccagcacaggccgactgggaactggggaaccagggtcttcttgaaacggccttggtatttcaccttcaggtaacgcccgatgtatttctccggattggccagttgatcccggcgagccgcatgatctccgaaggttgtatcgaaaattcccgtggcgtattgtccacgaccgtctgctttctccttcactttggggcagaagacgcggagaactgcgttcccgtctttgccttccaccacgtcaacaacctcgaactcctcgtccaggaatttcttgtacttctggaggtcggaagatcgctgggatgcttcgtaaagccccgtcatgttccgaagcatgatgccttcgtacccttccatgaccaccttatcgtggtacttgtctacatcctcccggaagaagattacgtcctgatccactacaaacagggtggggttccccataaggtctgcgctatagacaattcgacgaagtgcgtctagacgccaagagaattgggtatcaacggtaacacccaacgctttacagctcactacatcgaagatgtggtattgcaacgccggacgcagagcagcgatgtggattgccaggtccaaggcgtctttggcttcctggagttcaaaatcatcggaaaactcgtcgtcctcgtacttcataagcttcttctcagctttctccacctctttcaaggtgtcagtacgcttaactgccgactggatgtcttccagggactcaccgtgcaggtaaatctcaccatcaaaaatgtctccaatctccatgatctgggccagagcctcggcaacgtgtggcaggatgtactgctccccgccccgactacgaagctccacacgcccatcttcatgtcgaagagccaggcatcggacaccatccatcttggggctgtagatggcggggaaggtgatggacttggagcgcttcaggtaatcctctgccagcataggaaggataggaacatggtccagatcactcttatcttctcggtaacctgccttgaattgcttctcaaccttggaagtggcttccagatgggcctgctgctcgccagtggtctcgtttgcacggcctacgttcttcggcttggaggtggtcaccttgacagtcagctttccaccctcctttccatgctccacgaataccttgtcaccttcactccagcagctccactgcttgaagttaccgcccttatccttttggtacattgtcactttttgcataaaccctccttattaacgaaattcaccgtctgagctttttaccagaatggcaaactcatccacctcgccgagcgcttgtactccaaactgctcttcatatgggttgcttccatgctgctcagcaacatgcacagtagtcagatacagctcatccatgaaggctcccaggggagttgttgccgccactgcggataccttgcctacaagagctgcaagcatctttgtctcttcgtaagatagctcaagcaacacccgttcgcgtttcttacagtcttgtgcgtacatgtttaatctccttttggcatgtggatgacttcaaccccgttcttcagcaggtaatcaatgcctgccgtcagtcggtactggtggcgatagtacaccctcttgatgcctgcgtcaacaatgtcgtgagcgcagtattcacacggggacatggtggcgaacatccaggcaccctgagcactctcctggctgcatgagagccatagtagagcgtttttctcggcgtgccgtacctcgggcctggtaaccccctcctcgttctccagagggccttccaggccgcttgggaggccgttgtacccctgactgatgatcttgtttccctggacaatcactgcaccaaccttcgcacgaacacctacagagcactcagcgaaggactcggcgcagcgcatgaaagcctctttatgcttctgcttcacagggagtacccctggcttttctctgggtattccaacacataccggtttttaacctgtacaccgttgatggcgttgtacgagtcgatgcacatgtccagaaccagctcagcaaaggattttgacaggtccatccctgtcaggtcttcgatatttgggcaccgacttttaagtgcgactgctccttcgtaaatctcctgctgagcaatgatagctttttctaggtgtccctcgggaatatgtacgtctgggtcggtagggtccataacccacacctcagcctttctcacggtgtttggccagataaggtggcagtcccgccatttgttcggatgccaggataataggcgatccagaagtggttgatacatcttgacctttgggcggtaaaccgtgagcccgttgttcagtttctccaccacaatcattgtcttcataacacctcctaggatggcttgcgttggccttttctggttgctgtcccccggcaggtgaggtctcctttggcctgctgcatcttgctggccttcacagtgtaccgcccctttccgtactcttcgtctacgaacgtctgggccttcatcctatctcgggtgtgtacgaatacataatcacccatagcgttctggatgtaccaggtagctggcggtgcgaagtccaacgccgagaagtcctggaaggtcaccacggtagttcttggggtactgctcatgtctactccttgcgggattactttgcaggggcatcctaacccaatgcacctgcaatgtcaacttatttcaggcgcaaaaaagcccgccacactgggcgggcttaggttatcagctttccactgcttcttcggagacttcagcggtctcctcttgcttggggcgtttctcttccggcactacaacgctgtacagagcctggagcatcaggcctacctggtcctgtagctcggcttgcaccacggcgtagcggccattcacttccatgtagtccttggaacgcaggaaggagtccaccttgcggattttcttccaatcggtgccatctgccgtcatcactcggtcgaactctttggccaggggttcgaggttgaccacctgcacagcctggtacagtcgatccagagtatcttcgtccggcataatcggtacgagaacactcatgagggcgtcatgtgccatttgcttgaacaggtcctggcggttcagttgagttgctttctcagtcattcattctctcctttttcaatttgttcttgctcagcatcatcctgctgcttaggtttcggctttggctgccgctttttacgggccggtttctcagtagcctggggctcggcttcaggttgtgactcagcttcagcttcgggctcggaagagccgaagtcgaacacaacgttctcatcttgccccttctccaggacagcccagtgcaggctactggacaacatggacacacgggaggtgtccagggtgtatcctgccagaacctgggattggaatgcaagcaggaaattcatgaggttgtagtctttgacctcaacggcgttctcagagagactctttacggcctccgggctggcgacttcagtcgggccacacacttcctcgtggaagagggtgatggtacgaacacccgaagcagagctgaccactgggaatccagccatggtgttctcaacacggtagccttcagcgatggcatcttccacggcttgcaggaagctgatggggttttgttcgactacacggatacgcttacgatccgctggataagcaggttttacggacattttgattcctccttgggattgagagtacactataccaccatctgaagcagaagtcaaggcttgacaagctaaagaatttatagtaatattattaaatatattatatataatatacaagggagggagtgggcaagtgccccctcccttgtactaagtatataattaatattaattactataggttaatttttatgagatgtaaaggctgtaataggataattaagtatcctagtaagaattcagtatcaggtaagcatgaagacctctgctccctgtgtcaaggccgtgccaagatggtaggccctactgagaactacgcattccctcatgcgaagcagggcttgacaccagtccgtcaatgtgactagggattgacaaacacacctacaggatgctatagtatctatagatacaccagtttaagacctgggagggttcctcctccttcccctctcaggcacccaaccaaggagtaagtatgagcaagttcgtaaagggccagagtggcaaccctcgtggtcggcccaccaaggaagctcaggccctcaaggcgatgtctgccggagagcttgatcacatcctcaaaaagctgaagcctgccagtgccaaggctattcagctcatgatcgacgaaatgaccaatgcgtcccagacatctccagtacgtctcaagatggctgacaaggtgttcgctgcctacctggcagccctcagggcacaggcgtccattgacgcagtaaagaacaagtctgacggtgttcctgagcaggaggatgaacctcaggcccaggtcgtagaattctcgctcactatgcctgccaagagaggagcatagcatgcaagtcccagtagaagtaatggaccgggtgttcccggagtcaagggtgtatgtggaatcagttctggctgactgccaaaccctggaagacctggtgaatcacaggatcagcctaagccgtaagatgggcctcaaggttccaggctctccggagtaccgagagctttggctggctgagcaaagtatccatgagattgagggctatgtcctcggctcttgtggtgtaggggcctcccagccccactaggcgttcccggagccgtatggcgggaggggttgaaggttcaccacacgaaccccctacgccccggaggttgccggggtaggtcctccaggctctaaagtcctggagaagtgtcagccggacctttgaggatgggagtccaccggcactcttgacacggcgtactgaacacggtttaataccctccacgaagaaacaggaggtaccatgagaaacatgttcgttacgccccatgccaggaaacgctttcgtgagcggttccggcttcagttccacccctcggtcttcgaggacggtagagacatctacgtcatccggaagcttttcgctgaagcgaaatactgtgattttgagcttcgtatgcggataggaaactataacgcgctctgcgtaaagcacggcagggtcgtaagggtttccaaggttcggaatttcgtattcgttcacgatgactcgacgatatacacaatcctgaaggaagggatggttctgtcaaacgtgaggttttagggtaggggtcttggcgaccaggttggactccaaattcaacccagctcagttcgaatctgagactgcccgccaaaaatctcttgactttatctgaaaatgtggtaaagtggatttaagagattcagatgtgggaccgacgaagctgatgtgcagaggaggtgatccagcatctcccggacgggtccgggttaccaacccgctaatttcatagcccgacagcaagggtagttcctgcggggccagggtccaagtgaccctcctacattccgttcggtccctcaaggtgagggagcttgactgttaatcaagacgtgcctggttcgattccagggagcggagccaaaagagtaacctccacgcataaggccttgcactgcgcaccaggaggttagtttcaacggaggggtggcagagcggtttaatgcaccggactgtaaatccggcgtccgaccgggcatcgctggttcaaatccagccccctccaccaaatgctgtgtaagttggactgttgcagtgaagcgataggctccccggatcgtaagccggtaacgtggggatagagggctcccaccgctgagcaacaggaggttcgattcctcaacacagccccaaaactgctccaggcagttcagctaggctaggcttgagaggtagtagcccgtttttccaaaacctctcacttacaatcaggcgtgtggcgaaaaggtttaacgcactggactttgactccagcatttgtgggttcgaatcccaccacgtctgccaatctacccgatgctaatcgggtcttgtcgctccgggtcagcgactcagaagtgacccttagccccggcgatcttcgctggggctttttactttctcaacccgtaatggaggttgcaaatgacgttccaattcactcccgcacaagcaagcgtgatgtctgacgataagcacagtatcatcctgtacgcctcccacgcaggcggaggtaagtcccacctcgtagccaagtggctcaccgaacccatgcacttggaaggatatcgaggcttggcagcccgaagaaccattccatatcttacgggccctggaggcctggcgcaacagatagtggatgttgacccaactctacggttctttcgaagagatttgatggtaaggactccagatcgcaggtcctcgatagttcttcgaggcatctcaagcgaggaagcccctagaagcctgggaggattcgtatttcaaagggcagcagttgacgaagccaaccaggtagacagcagcgctctgacgtacctattgagcaggctcaggaactcccaatgtcctgagataactccccaggttttgatgacattctctcacggagattattccagcacattcctagacgcccttgtgcgacccttcattgaaaaaggggatagcccaagaggacacggtggggtaggggggattgatcccaagaagagtggtcagaccaggtggctcacctttttacgggggttgccggttgtcgcaaagaaccaggagtctctgatagacctcttggagtgccacacagggaaagagccagaagaagccaacctcatcccatataccctgtacttccagccggacgttcacccggttgtgaaagaactctaccccgagtacgaatctcatctgaaaaccctcgcatcacctttaagtgttcagatgactggctactggggtgacgaatagccccgcatagcggggcttttttgtgcccagggattggccccgggcaatgcaacaaggagcctaccatggcttatgaaatgaccccagaggataaggtcctctacgatgcaatcgctcgaatcggcgtcctgggagctatccaggcaggcctgatgaaggcaggggacggtggggagcctgcaccggcaccgaccgtagataccctggaaggcgctggagccactggtaaggcagtgatgaaagctgcggatgctgctactgcacgaactgctattggagcaggaacctcgaacctggccatcggtaccagtgcaagcactgccaaagcaggcaactggaaacctgcctgggcggatgtcaccggaggcgacgcagccgtttcggcgggtgttaaggctaaggtgaattccgtcgcagcagtggccgaagacgccgagttggcagccgtcactgccaagcttaacgaactgttagctgccctaaaggcataaacagggactgggggcttgacaaagttaagcccctagcatatactgaccatataagcaagagaaactttgagggcttgacaaatgactaagacagtcatcggtcctaagtctccgaagcaggaagcgtttatcaactccactgcgaacatcaccgtgttcggtggagctgccggggctggtaaatcctacctcggagtgatggactttctaaagcatgtgaagcacccgatgttccggggcctgatcactcgacggaccactcctcagattaagggccctggaggtatcttggataactgccttcagttgtacaagcagtttgacaagaaggtcaaatggaaggataaggacgggaaattcgtcttctcctcgggagctgagattcaccttcgacactttgcccacatcgacgataaggacaactaccagggtctggaaatcaacgaatttctcgttgacgaaggacagcaatacaccctggaaatgttgctttacttgatgtctcgtatgcggggtccgaagtgtccagaggttgaacctcacatgaagatcacctgcaaccccgattataacagtccgctgcgtaagtggctgacttggtacctggaccctgagacaggtatcccgctcccagaaagggacggaatcactcggttcttcactatccaaaacggagacatggagttcgctgacacagcggaagagctgattgaaaagtacaatctgaagtctcctcccctgactttcaagttcatttcggcaaacgtctacgacaaccctgtcgtgatggagatcaacccccagtacgttgcctggcttgaaggtttgaacagggtcgagaaacttcgactgctccatggtagctggtttgcccgagaagaggcaagcggctacttcaagcgagaatggactccaatcattccgcttaggcctacggataccgtgcgacaggtaagagcctgggatatcagcggtacgcttccgtcagactccaacaaagagccagactggacagcgggcgtattgatgagcaagggccgtagcacgctatacacaatcgaggatgtggtgagggaccgccgccgtattggtggggtttttgaactgatccttgagacagcaagacatgacggagctgacactacgatcctgattccacgtgatccaggagcggcaggacagcaccttgcatgggactttgttcgccgcctggcagagcacgggttccatgccaggacccgtccaaccaacaaatcaaaggtcacccggttcggtccttttgccagtatggcagaggctggaggtgttcaggtagtagaaggcccctggaacgaggcttacctgacggagctggaggtgtttgatggaagccggaatgttaaggacgaccaggtggatgccacctcggacgcctacacttatttggcatccgacatccacattcccaacttcatccctccggacctgacccgaccaaacccgctggccattgaacgataggaggccctttgtggctcggagaaagaggaacgtcagaaaggcggcagaagtgccatcggccccccgccttcggctgggcgaaatcggacacacgggcctaaagcaaagcggtggtgcaatctacgaggaaactcgggctgagctacggttccccgagaacctgaacaccttcaaggtgatggcccgagacgccaccattgcaagtgccctggcattgttcgaattgatggtaagccgtgtagaatggagtgtcaagggcggtacagagcctgacgctgccatgcaggagaaggttaaattcctctcccaggtcatgcacgatatggaccacacatggtacgacttcatcaaagaggtgaccagttgcttcacttacggcttctcgatccatgagaaggtgtaccggaaacggacgtgggcaaatggctccaagtacaatgacaacaagattggcctgaagcgtctccctgtccgttctcaggagaccatcaggaagtggcggttcagcgaggatggtagggacttcctcggtgctgtgcagtctcccaaactgatcagtggatgggagcagcggtatggaacctatctgaagaacctgcccaacggtggtgatgagattttcatcccgaaagagaagttcctgaacttccgtatcgaccctcgccgtgacaaccccgagggcaatagccctctgaaaaacgtatacttcgcctggagttaccggactgccctggaagagcaggaagccgtaggcattaccagagatatgaatggtatgcctaccctgtacatcccgcctcggtacatgtccccggacgcttccgacgaagagaaggcgatctacgagtattacaagaacgccatgcggaacatcaccatgaatgagcaaacgtcgctcattcttccgcagcagtttgacccggaagctcgcctcccgctgttcaagttcgagctgactagcagccagggcggtaagatgtacgataccgacgcaatcatcaagcgttgggataacaagattctccaggtcctgttcgcagatgttctgaagatgggccaggacaacgttggctcctacagcctggctggtgctaagaccaacctgatggctatggccattgaagcacgtttgcagatgatccgggacgtgctgaacaacgacctggtacctcaactgttccggttaaacggatatcgccccgatgaagagttccccaccttcgagttcggcgacctcgacgagattgacttggatgtttactccaaggcgatccagcgaatgatgtccgttggtggcctagagtttactcgtgatgtggccaaccgaaaccgcaaggccattggcctaccggaacttcctgccactcaagctatcgaccgagaggctctgcccttggcaaacgacagcaaggcaggggaggggatgaagacggcgggtgaagggacttctaagagccccagcgcccgcgatgattcaaccgcaaaccaggataactgaaatggctgaagaaaaccagccgactcccaaagaggacgtggtgaagagtgttgacaaggccgagcgccgggcactctttgtcgtcctggctccggatgaggtggaccttcacggggacatctactccgcagtcgaggtggagaaggcatgcattcagttcaaccggcactgcatgaaagccaacctgttccacgccgtcgagaccgaggctgcccagattgagcaaagcttcatcaacctggccgacttcgacaccgacgatggacggaccattaccaaagggacgtggtgcgcttggatgcacttcccggaaggtgatgcgctggcagatgacctgtgggcaggggtgctggatggatcgttcaacggcgtcagtatcggcgcccgagcaactgtagaggacctcaccgatgagtgatcgaaaagccaaacgccggctgaccgacatctcttttgaccatgaaggcgctcatctggcgctggtccataagggacaaggtggccctgcgaatgggtatacgaccctggtaaccaaggcacttgacgcgggaatcccgcaagacgtgctgaaagccaccaaggtcaaagtggagctggagttcccggagttcctccggaagttcttcaacatgtactacagcgatgcagagatgttgtctgctgccctggggtacggcaccactgaagggaaagattggcagatggacggagagtcgtaccaagagtacatcgaacgccgcgtaggtggcatcgagattctgaagtccctgtacaagagcgaggaccccgttgccggcttgaataagcttgacgacgcggcaatcgtcagcatcgcgaaagctcgtgacctgctggaaccccatatggccaccgcttctggggccgaccacaccaacaaagaggaaagccctgtgagtcaagaactcatcgacaaagctgtacaggcagccgaagcaaagctgcaagatgaactcaagaagcaagccgacctgctgaaggctgctaccgaacaaatcgccgccatggaagccatccagaaggccgctaaggtagaagctcgtaaggccgctgtagccggttccggtgctgacgctgaagctcaggttgagctgatgaaagccatggaaagcctgagcgatgaaagcttcgctgtcgttctcaagcacatcaccaaagcaaaagaagttccggctggtctggaccgtgaagtcggtctgagcggtgcatctgacgctgaaaacgctagccaggtagagaccctcaaggctctgatgctggccaagtacaccaagcaataaggtataggagcccatcatgcccgttatcgctaccgaccatcagcgcctgagcaactggctcaagtatgaatacgacccggcctccggcgtaacccgcgaagtcatgccgaaaacctggctggacccggctgtgaaagcgaccggctcggttctggacgctgacggcaagctggtcaccaaggcgaccgctgccaacgctgcctacatcctgatcgattgcgagcaccgcgccgctgctgaccagtttactcaggtcctgcttctggcacgtggctacgccaagatcgccgacgaaggtgtgatctttgcggacgatgtagaagccgcagacaaagaaaccgctttcgcagaactggcgaagaagaacatcttcgctgtacaccaggtataaggaaggaaccatgcgaccgattccctcgcttcagaacaacttcgaatacaccgacctgaccgagccgatgatcctgatcccgaacgtgtggggtctgacccaacagctcggcatcttcggtgttgaccgcaccacccaagagtctgtgactctggaagaaatcaccaagtcgttcggtctgatggaagatatccatcgtggcgctcgccaccaggttggccgtgactatgatcgtcaaatgcgcaccttcgcggttccgcacttcacctacgacgattacatcaccccgcgtgacatccagggcaagcgtgcctacggcaagcaagagctggaaaccctggaccaggttcgtatgcgcaagctggagcgtctgcgtggcactcacgccgctaccatggagtttgctcgtatgcacaccctggttaccggcaagccctacacccccaacaacaccgttggtggtgctaccggttacgactggtaccaagagttcggtaagacccgtttcgaagtcaacttcgagctggacaccccgaccaccaacatcctggagaagagcgagctggtttacgctcacatgcaggacgaggcctacactggcggcgtagttggcgatgttatcgctatctgctctccggagttcttcagcaagctgatcagccacccgaccgtggttgaggcgtacaaatactacgccagccagccgcagattctccgtgaacgcctgcgtgcccgtggcttcgacgcccgttaccgtgagttctacttcggcaacgtgctgtacatcgagtaccgtggtggcttccaaggccgtccgggtggcgagaagcgccgttacgttccggctggtgaagctgtcttcatccccggtagcggcaccgaagacctgttcaagaccttcttcgctccggcgagcaagttcgaacacgtcaacacccccggcgaagaaagctacgcgttcgagtacgtggacccgaaaggtgagttcctggagattaactccgagaccaacttcatcaacgtcctgatgtacccgcaactggtcgtgaaaggcaaagcggcctaagaaaacgggggccttcgggcccccttttttggtcccgagaaaaggagtaggatatgccctacacaggcgatccgaagaacaatgtggtcgatcagctccgcctgatggtgggggatatctgggacgacattgaaatcttgacggacgaagattaccaatattttatcgacatgtacaatggcaatatccgcagggctttcctggacgttgtacggtcaatcctcttcaagctggcacgttacgtcagggaacggactggtgatattgaggtctacggaagtgactggtggaagggctataggcaaactctccaggatatcttgaaggacccgaacctgacaaccgtgattgctctgccctacgttggaggtgtgtcagccaaagacatggccatgaacaatgccaacccagacaacgtggcacggaagattttcattggattcaatcgtgatttgcggctttacgagcagcagaacgtagggtacaacgacatgccgagaatcgggaaggccctagatgcccagccgaatctctgctgactttcggaagctagacgctctgattgcccggatggaggccttggacggtctgacgctggaaggaggcttcttccctgaagaccggtacggtccagagaatggtaacctcccagtcgcccaggtggcagcctacaacgttttcggcacggaaaccaacccggaacgagacttcatgactcccagctttagtgactgggccacggtgaactactaccggaaagccatgaagcaggtggtagaggctaccattcgagatgggcggacccagaaggggcagctcaacaagatgggccgaaccatggtggagattatccaggtcaacattgacgacttcccaggccataacagcgctcgctgggcccaggtgaaaggctttgacgaccccctgacccatacgggcaagatgcaggatagcgtcaagtacaagatcgtgaggaggaagtgatgctcacgccacccatgctaagcactcacttcgtcaagaacgaggtgattcgccggcccaggaagcgcctggtccgaggacggcctgttcaagaccctccggagatttacattgtcgagggaagcttccagcctgtgctgaaaagcacggacacgatgcaactccccgagggtgaacggaccaagaaggctttgaaggtttataccaggaaccacaccaccctgcgagaagccaacgaggctgaggatggctgggatgcggaccagttctggtggaagggcgagctgtacgaagtcgtgaagaccgcttcctacgacatgagggtcctggatcacgtcaaagccatgtgtgttcgtgtggagggtacctgatggccctgaccatggacgagctgagggcgaaataccccggcatagaggacatttacacccagttggaagatgccctctacaacgtggctgaggctgctttgggggatttccctctggtgctaagctactgtgataaccaacagacccagacgcctgcactgtacatcgagccgatggacatcaaatcggtattcaccgagcaggtagcaggcactctggagattgacccaacagacccagagagggctgtgcaagaggtcaccaagtggtacacccttaaagcccgttttacaggcctggggagtccacacaaccacgccatggcagcggcagcagtccagcatttggaattcttcctcagcactgaggatggttaccaggctttggaatccaacgggttttcaaagaatggcgccaatccgattcgccggatcagggatcaacgtcccaatgagctgtaccagcatttccggtacgatgtccatctgtcctacgccataacacggaaagaagaggtgacctggatcgaagctttggagctggacgcggtttacaccaacgccggacgagagcctgaccacgttatcaagaaccatatctcactcaacgaggaaccctgaagatgacccgtcttaccgacatcatccagatcaccattgatcggcaaacgcagccggtagccaccactgcgttcaacgtgccgatgttcctggctacccactccaacttctccgagcgggcgcgggaatatgcatcgacggaagctgtcatggcagacttcccggacaatagctccgtaatgcaggcagcccgtatggccttcgcacagaacccgcgccccaaccgcctggttgtcggtcgccgcaacgtgccaggagccactgtctccattgtagaggtcgcaccgcagaccacctacaccatgaccctgaacggtattccggtgagctacctgtcgaaaccggaacctgtggatgaagatgacgagccggcagacacggcagtaaccatctgcgcaggactggtagcagctttcaacgtcagcccggtcgttggcatcactctgaccgacaataccgacggtaccatcaccgttcgcagctccagcacctcctggtcgctgactacctcggcaaacctgtcgaagtcgaacatgccgtccaccgagggctggggtgccgctatcctggcagtaagcgctgcgaacagcaagtggtacggtgctaccatcgaatctcacgtcccggcagatgtcctggaagtggctgctaccatcgagtcgatgagtgcgaagaaaatcttcggtacctctaccagctccgtggctgtgaagaacgccactgctggcaacatcctggaaaccctgagcaaggcaggctaccatcgtaccttcctgctttggaatggtcgagctgaccaggacttcccggagctgggctggatgtcgagccaactgcaagagcagccgggcagcaacacctggagcttcaagggcatcgctggagctacctacgatgagctggacgaccaagagtcggcaaacatccacgaccacaagggtaacacctacgagttcgttggggatgccaacagcaccacgttcggtagcatggtgtctggcgagtggatcgacaccatggtaggcatcgactggtttgaagctcgcctccgggagcgcctgtggttccgtcagcggaacagcaagaaaatcccgtacaccaagcagggtaccaccatccttgaaacggatgttcgagcacagctccaagagggcattcgagtccaactgttcaccgacaccccggctccccgggtccgtgtacgggatgcaaacagtatgtctccgaatgatcgggctcgccggttctatgacggtatcgagttcgaagctcagctcgctggtgccatccacatcatcggtatccgtggcgtagtcacggcttaaggagtagacaatggcaggccgtacttccacttacgcccctaaccaggttactatcgtaatcaaccacgcggcttcgggtatcagccacaccctgaccggcttcagcgaagacagcattgtctccgttgaacgcctggtggacacgttcaccgagtatgttggtgctgatgacactcacacccgggtgttcaacgccaactccggcgcacgggctaccgtaagcctggcccagacctcggagtcgaacgatgtccttaccttccttcacgagtttgaccgtgaagcgatgtccgcagacggcatgttcgagatgctgatcaaggacaactcgggccgctccctgtacttctcggacgaggcgtacattgcagtgatcccgcagggtggcttcagcaaccagatgaacacccgtgattgggtcatttccatgaccaacaccacgttccaacatggcggcaaccagaaggtgagccccgctaccgcagacaccctcacggctcttggtgtgaacctcgacgcccgctggctgtaagcgacaacctggccgcccctcgtgggcggccttttttgtacctggaggaaatatgaacaccttgacttactctccaagagaggttacgatcctgatcgccggagcccatgaagtgaccggatacgcggagggggagttcgtcacgatccagaaagaggttcaagcgacccagactcagcgagctatggatggatcagtggcccgcctctacactaaggatgacggctaccgaatgaccctcaccttggcacagtcctcgcctacaaacgacttcctgggcgctgtttacaacctggacgcagctacccgcaaggggaagttcccgctggtggtgaaagacaccctgggaaacacaaacttcttcgcaggcactgcctggattgagacccctccgaccgtagggtttgggggtactcttcgagaaaacgtgtggcgattcgcttgctacgacgctaccctccggatcggcgggaacagcgaccttactgacttcgagaactacctgagtcagggcgcagccatccttccaatccttcgacagtacggacttatctgatgacaaagcgtgtgttgacttacgcccccgaggatgttagactgataatctcggagtttgaatgcgtaggtgtagtctcggttgaggttgcctgggacatggaggtctaccgtaaagtggtgggcatccggggtcaggtgacccgagttcgaaacctcaaccagtctgcacgtatgcgagtagagcttcttcagacctcggacacaaacgatgtcttgttcgacatcctgacacaggaccgcgttaaccagtccggcaggctagacctggccctggctgacaacaacggcgataccatcatctacaccaacaacgcctggatttcaggccacccccagacccgtaggagcctggggtttgacaaccctgtgtggacgattgagattgcccgagtaacggaccgtgatctgtctggttcgaacaaccccctagacttcttcagcttcgacgggctgaagacggctgcgggtaatgcaatcaactcggtcttagaccaattctaaaaggagagcccaaatggcacgcaagcaacattccatcgaaatcaacggtgaccgtttcctgatcacctccatgccggctaccactggcctgtctcacctgaagatgctcaccaagcttctcggcccggcccttgcagaggcaggcgtaggctcgaaagagggtgcaggttcgatggacatcgccaccctggtcagcaaggtggttgagcggatcgacgaggttgaggtggaaaagatgatcatcggcatgatgaccagtgtgtccaagaacaacatggaaatcaacttcaacgaggagttctcggctgactttggcaagctgttccagttggtgactgaggtagtgaagctgaacttcggctcggtttttcaagcactcggtttcgacggtcaacagtaagtggggaggggggtgaccagatggtacacccccgcctaaagcggctcatgaaggagttccaaaaggactacgaggtctatcaggtgttgacgcactctctgcgcctggcgagccttcacgagctgcaaacgctgtacgataccgaggatttatatgacctcctagagtaccaggcagctcacgacgaagccgcagacatcgcccgagaaatcgccaagctgaggcaacaagatggcaactgaagagattacaaagctcgtcgggacgatccagtggagggcggataaccgccccctgctgacgttcaagaagaacctggaacaggtcagagaccgcctcaacgaagtggctggcctggccaacaagaaagtgacgatgagggttgaccttgatggtcgaagcctggcagccaagatcaaaatggctaccaatgcccagattcgtctcaagaatgtggacatcgcccaggacaccctgggaacgatggtcaagaagctcagtgagcgactggcaaacactccagtcacgctgagcaatgttcgtttcaacatcaaggatatcgcccaacagaagcgattccttcgcacgtttatgcaaggcttggctctggaaattcccgtctctattcgagcgaggaaggcagagcaagccctgttggcatggaagcggcagactgagcaacgcttcacgcttcacctgaatgccgacatcagtcagtccaagttctaccgaaatgctcgtcggaccatcgacgcagtgattcagaggctaggcactatcactctgcggacgccaaatatcaggctgtcggttgacagggctcacctccggcaagagattgcggatgtcctggcccagattcgccgagaggctagaattagaatcgatttgcaaggccatgtcaaccaggtaaggggcaggaatgcccatgctgtgggaggtatggctggtgctggtgcaggggctgctgtagcccactggggacgaggctttatccctggcctgggaggcgcgtttgccatctcccagatgaaccagatgggtcagcaaatgatcgcccagcagaacgccatggctgcggtaggtggtagccaggaagctggtcaagccactatggcacagttcaagcagatggccaacgaggtcggcttcgactggcgagctgttgcaccttcctacaccaagatgctggcctctggacagggcgccggaatggacaaagatgttgttgacagcatcttccgttccatgacagagtatggtaccgtaatgggcttggataccgagtccatgaaaggttctttgcgcgccgtcgaacagatgatgaacaaagaacaggtgatgtctgaggaactgaagctccagttgggtgaacggttcccggcagctatgagcctcatggcccaggctgtttctgcgaaagaaggcagagagattagcaccaaagaactcggtgatatgatggcgaaggggttggtccgaacggacgtgcttcccgagttcgctcgtatcattgccgagaaggcccgagaaggcggtgcgttgtccagggcgcagaactccactgctgcccaacagcagcgctttaacaacgcctggtcggacgctgtggggctgatctacaacaacggcatgggccagggcatggccaacctgttcaaggagatggctcggacgctgaacgataacgaggaggctgtaaaaggcctgggtgctgcgatggagtggctcctttccccgtttgaggcagccgctatcttgattcgtcagatgctgcaacaactacccgacctggccagcaagctgggactgacatctggacagttgatggctttggctggagctatcggccttgcgctattcccgttggggcagattgccttggctattggcggcctgttcctggtggtcgaggatttcgtcggcttcctgcaagggaaggatagcgtaattggcgacttcttcaaccaactgacgccagagcagcaagctgtgtggctgaagatcggtggggcagtagtccagacagcagaggcggttggtcgcctggctgaagccatgggagagctgctgggagggttcgctgagggtggtatgttctccactgcgctggacttcttcacgtcgaagattctggccgtgctgacagtcatcaccaagctggttcaggctgctgaagccctgaagaataaggattttggcaaggctgcgaagcttgctggagacgccggggccgtagcgctgtcgaacagcccggtaaccatgctcctccgtgatgacctccggcaggaccttgaggcccgagcccgacgtgctcagaatgacatggggcggaacatagatgaagacgttgttcgccgagtccctgagtacctcaaagcggagaacggggtgggtggtatgcccagtgtagggcagattaccctgaacatccccatccagattgagagcgctcctcaaatccaggatgaaaaggagttcagcgagatgcttcaaacccgaatcatggacagcttccatgacactcttcgccaggccatggtggatgcatcggagaacaagaaatgacggtagctattcaacgagagtccggggatatcatctggttcgatgcgattctgaacctgaacatctcccgggctaaccaggtgactcagcacgtggtagaatcgggagcttcggttaccgaccatgtgattgctcagaatcagaagatgaccctttcgggggtcgtctctgacgctgacttcaacctggacaggccagttattacggctgctgacgcacaggctttcgggatcacccctaagccttttgtcaatagtacgccagtgacatcgggccccatcatcaccccgggggcagacacggcctggacgaacttcctcccggagacggtcaaccagttcttggacctggacaggcccaccgtggtggttccagcggctcccaaggagaagggggcaaacctgatccgagaagaactggacaggatcaccagggaccgtgagaggattgtcctgctggacttcgaaggctctgctgtgaggaccatcttccagaacgtggtgatcacctcgatcagcttcaaggaagacccgcagagcggtgagtcgttgtatgtggacctggcatttgaggtgatcaggacaaccaccttccagacggcagccattcccaagaaggtgagcgattcgatcaagaacaaggccagcgagaagcaggccaagggcaagcaagccccgaaagatgagaaggtaacggatgcagacgggaagaacccgaaaggggaaaccgtattgcacaggatgactaaccgggaggtgcgatagtggctatccgagagcgggccaggctggtggagctacccacttaccgagacccacaatacgcctaccaaatgaagctgggggaccaaatccggtacctcagcttttcttggtcggataggcaacgatattggcacatgaccgtagaaaacatggacggagaggttatcattcggaacatgaagttggttccgaactaccctctaggctatgactacggatgggccaggtacgggctgaacgggtattttctagttctccccgacaaccacaagaacgacatctgtgaagatatctctactctcaacgagttcttcgaactgtactacgtggagattgaggaatacgacgatagcgaggaggtgtaaatggaacagttcgaacgggtgtacttgctcaccgttggagattaccggacaggcaagggagtcctgatcaaggatgtacacatgcggttcgacatcagcaagtcggcagacaacaagaagaagtccaacagtgccacggtcgaactgtacaacctctcagcaagcacccgagcaatgcttgatacggactatttgtcggtcaaactggaagtagggtatacggcagccggaacccgggtggtactggagggcaacgtggttgaacgccggactgcccagcagggcccggacatggtgactcagctcatcctgggtgaggggtacaccgacctaaaccacatccggctcaagcagacgattcctccggggcagactgccaaggatgtcattgaagctgctatggggcaactgcccggcgtggtacggggtgttttttcagggaccaatatcaacaaccccgtggtgttcgggtatcccatggacgggagtgcaaaggaaatcttgaacgacatttgcagggacaacaatatggagtggcggtgtgatgcaggcgccctctacgtcaacgatgtcaacgggattcacgacaaaaacatcaagtcggccccggtactgaacgaatctactggcctgatcggtatcccctaccgaacatcctctgaaggtaatcggcagaagggagacaagaggcggacgcaaggtgttcaattcaaagccctgttgaacgccgactttgcccctgggcaagtagtccgtatcgagtcaaaagaagtgacaggctggtatcggatcaactcagccaggtactacgggggctacgatgaccaggaatggtacgttgattgcttctgtggcatcattatcgaggaagacctcagatgattgaactaagtttcagcagcgtggtgaacacgctgatcgagcaacaactgaacaatgtgagaacagctatcccgggaagggtcatccgagtctacaaagaccttgagaccctgatgattgacgctcagcccctggttaaccggctgtacgatgacgggacttcagaggagcagcctaccattctttctgtgcctgtgcaaatgccgggaactcgaaggaccttggtcagcttccccttgttccccggagatgaggttctactggtcttctgcgagcgaggcattgataactttaaagccggtaccgggaaccccaccaagcccacggggtctcgaactttcagtggacgtgatgctgtggctattcctggggtcttccccttcgcagtcagccccaataaccctgcacacaggaagtttcctcacagcacctacgacctggtggtagcacacaacctggccactgcaacggagtgcgaggtgaggctgaaggagaatgggaacatcgaactcctgacggacctagacgtgaacgtcaaggcccggaacatcaccttggaagggtcagaagggattaccctgaacacaccggccctgaaagtccaggcacagaataccacctggacagggaacatcacccactctggaaactacacccagacaggtgtatcgacattcaacggcattccgttccacacccacgtgcatggaggggttatgcctggcggtggtactactgccgtcccacaagcgtgagggattatggaccttctactggatgaaaatagtcacgacatcgtgttcgtgaatgggcagacccctgtgactcaggggcaagttcagattgtagctcaaaggctcaaaatcaagctctggacgttcctgggtgagtggttcttgaacctggacgtaggggtgccctaccgtcaaagaatcctcaccaaggtggcccacaaggcgacggtggacatcatctttcaacgcctcttggctgaggatgagggggtgaaggaaatcctggaatatcgaagcgaatacaacgcgcctgctcggcgcttcaccttagaattcaaagtgcggacttactccaacgaagaagtagccgtgcgactgccgctggaggtataaatggctggattgactgacaaagggctggaaatccggtaccttcctgaggtactggagcagtaccacaaccgagcccaggacatcttctctgacgaagttgaacctggtgatgtagtagataccagtgagaactctaccctgggccgcatgattggcgtagtagccccaagcgtggctgagctgtgggaagccctgcaagaggtgcatgacagtttcaaccccaacgtggcaaccggctacgctctggataacgaagttgctctctcaggtatcatccgatacgctgaagagcccaccagggctcaagtagtgtttgagggtaactacaacatcgtggtcagctcggtgggctctgtatcctccagcgtcaccttgaggcagttccgggtgattaccccggtattgatgaaccttcaacaggcttcaggggtagcctggagggtcacggctgttgaagctggacacgagtataagatcggttactcgacggatggtggcagcaactttgtatatgccacgtacaccgcgacacccacggacactgcaacgtctattcagaccatgctgggtcaaaaggtatctcagtcgtggaccagcttcgaaacacagaccgatgccaagaacaactacaactgggcccgtcgcaggaatcgtctccagattgtccacttcgacctggacccccgcatcaccccaatcaaggtggccaaacccggggtggtagaggatacccaaatgggcccatcgactcaacttccagggacgattgacaccatctcggtgccgatcctgggctgggattcggtgtacaacccgaccaatgccgtatccggcaggttcagggagacggatgtcgaactccgggaacgttggaggaattctaagttctaccaggccgctgccatcttggaagcgatgctggatggcatgcaccaagttcctggggtgcgagatgtgaccatcattgagaatgacaccaacaaccatgactcggtgcataacgttcctccccacgccttcacggtgatcactcatgggggtgacgactctgacatcggcaagatgatttggcagaagaagcctacaggtatccaagccttcggggacacggtggtgcagattgcggactcccagggcaaggttcactccattggattccgcagagccaaagagattgaggtccaggtcaacctaaacatctctgccattgcaggtcaggttcttcccggggatgtaaaggaacaggtcactgctgccatcctggcgtaccaagatgggctggacaaaattggtaaagaggtggtatactctagactatacactccgattaacagcgttccagggttccaggttaacagcttgaccattggaaagaaagggggcacccaggccatggcgaacatccctgtagggtatgacgaggtggctattttcgatgccacccgtattgcaatcacggtgacctgatatgctggaaaagaaccagttccggatgattgactttctgaaagtcgctcaaagccggtacacagagcaattcaagaagaagccgatcttcgataagttcgtagagctgcttcttcaggctcaaattgaactgcaagaggttatgcgccaggtccagcaagagcggaccctggacacagcagtaggggctcaattggacgttctgggggagattgtaggtcttccccggagtcttgtcactgccgagatattcaaattcttcggctacaaagaccgtcctgacaacccaaccccgctaccgaccccgggcaacgctggaccttacggttccttgaacgacccttcagtcggggcaccttggtgggggttggggcaagctactgagatttcccgggaggcaacggacgaagagtaccgcctgatgatcaaggcgaagattctgaagaaccggacgctatctaccccggaggatgtgatcgaagcctacaagttcctgtttggggctagccagatcatcatcgacgaactgggaaacgccaactgccgtatcggcatcgggaagattctttctaccgtggaaagaggtttgctgttcgagctgggcaacgtggccagcctgttgccgaagaccttgggtgtgaactacacctattcggaattctctgctgaccgcccgtttgccaccgaaggcttccagggaggttttggcacaggtgacctgaacgacccctcggtaggtggtattctgtcgaaccttctaacgtaagagagcaaaatggccaatatcaacaagatcagtatgaacctgatttggggcgtctctggtgatatcaccgccccaggtccggaaaagatgaacaagggctgggaggtggaggtagttccccggcaatggttgaactacctgcaaaaccggttggacaccaacgtggcctacctgctccagaagggcttgcctgagtgggacagtgagaccgagtatcaggcaaacacctcctatgtacaacgcaacggtgtagtgtacaaggcctctcggacaaataccaacagtgagcctggcacgactgcgggaaacaccaactggaaccgggctttccaagagtggtctccagctctggagtccttgacggcgcttaccccaactgcgtggagattcccgttctacaacgcttcaggacaagcaaccctgggtggaatcacctcctacactgtagggcttatgggccttagctccgatgtagcctggcgggcagagctgaaagctcaagcgagtgcttcccagctcacgtggctgtccaacctggcacctgtagctggagctatcccgtatttcaatacggctacctccatggccaacctggcaacgaccccgtttggtcgcaactggattggcgtagcagacgcagcaacgggtaggtcgcagcttcaacttggcaacgcttctaccatgacggccacggccatcaatcaggctagcacagttgtttcccgagattccacagggactgccgctatcggtacggtaattggaagcctgacggggaatgcaacttctgcgacccgtttgcagacaggtcggaggattaacggggttgttttcgatggcacccaggatatcaacctacccccgctgactcctgattatgcaggggtggtggccaggctgcacatcaatggtgctgggatgacggggagtgataagactacccaactggcgttgagaaacatctcggacaacaactggattagtcttgctgtattggatgataaaactctccagtttgcgttccgggatcaaacggacccatctgtaaggattggcaataacccgatctttcacgcagggaaccagtttgacctgggaccctccaggaactcggcgagagagaacctgggacttgacagattcagccaaagttccaccgattctaacgtgttttccagtctgggggctaatggtccttatcttgtggctcaacctacggcagtaggggggttcaacaacgctacaggggcgtggatgttccggtttgaccagacagggacgatgactcacggtaccgtaccggttgcgagggtatcagggctggccaactcggctcaaatccccgccgtaaccactgcccagtccaactccctagttcagagggatgcaaacggaagcttcagcgcaacaggcatcaatgcctatgggaccatcatcgggtacggctcgaacatcttcagccgctcttctggaacagggaatgcccatatcggcttccagaaagcggacggtagtgagttgggtctgatttggggtgccccatccaacgggtctatgaatttccggactctggggggctcaacaggtatgactctgacaggtcaagacttgactgtagtcggaagggtcaacgcaaccacgctgaacgcctctggcaacgtgaatgcaacagggaacgttagcgccggccaagctattctcaacaccgcagggaacattacgggagccgcttacggcacctacggctctcttaccaactgggtggattcggtatatgccaagaagggtgagattcctaacgatattgcccgagctggagcagcctgggacgccgtagggcagtacatcctggcaggagaccagtcaggcgggtcgggaggacctggcaccattagggcagggagccaactgaaaccgtactctaccatcagttacaccgcaggggcagttccggcagccgggcagtaccgttgcatgggagcgtttgcagggggtggtaaccagatcaccctgtggcaacgcatttcctaaacaaacaaggggcttcggccccttacttctacctggaaggtgaggatgaaattcagaaacgttgtaaagtataagatggggtatgagtgtgagattaaacacccggaatgggggtggtcaccgtacttcgcctgcgactacgacgagaatgctaaaaagatttatgacgccattgtgtctgccattgaggcgggtgacatcccagtcccggaagatgtgtctgaccgggatttggtcattgatgcccgtaactggagagataatgaactacgagatgcagatcgtcaagtagaaatggccatagacgatgaagatgcggtcaaagagaaggcctggcgaaagtatcgctcagctctgagaaagtggcctgaaaaggcgggattcccttccgcaaagagccgcccgcgccgccccaagaattgaggaaagattatgccgcttccaaaacctgacgacctgtccgtaatctgggcatctattgggcaggcgactaagcctgctccaaacaagatcatgacaggctggaccaacgaaatccctccctaccaatggcacaactggtatttccagagggtagataaggccctggcccacatcaaccaacaaggcatcgccatgtgggatgccgccaccacttacgaagggggtaccagcctggccaaagggtcagatggggtggtgtacaaggccaaacggtccagccgaggtgttgaccccgtatctccggcaagcaacctggactgggaacccgcattcgagaggtacggtgaggctgcgaaagtaaattcccagcttcaatccttgaaaaaggattatgaaacactggccaatatcagcaacattgccatggccaggcaaaacctctcggtatattccaaagccgagacagatgtccgatacgccttcaaggctggggcagccgggcaggtgtttgctgtagcccccgccacagcaggaagccatgcagtcccaagggatcagttgccagccttgtacccccgagctggagcagcaccaggcatcatcgctttggcaagccaggcggaaggatacgcaggcaccgttgagaacaaggcgattgcaccgagtgtcctgaaagcactcaccctgtataagagccagaatctggcggacctcccggataagcagcttgcccgggcgaacctggggctggccagctctgctgtgctgccggagaacacctggctcaagcgtaatgacaacctggcggatgttcccaacaaagccgcagcacgggctaacctggggatcacgtcttcagcgctcctccctgagagcacctggttgaagactgctagcaacctggctgatatccccaacaagcccacagcccggtctaacctggggctcacagacactgctacactgcctgtaggcgacgtaatgcgcaagagtgagaacctggcagggttgaccaacgtccctcaagcacgggctaacctgggtttgggaactatggcaactgccaactcgggagacttcctaacctcggcgaacaaccttggagatgtcagggatgcacaagcagcccggaacaacctgggcttgaaaggatgtgctaccttggatgccctggggcttcccacaggagccacaggcctggacttccaatcggaacagtcctccagcgcatccggctgggcagctcttccgaacgggttgatccttcagtggggtcaaggccctgcactgtacgatgatcggtctacgattgtccggctgccacgccaggctcgaatcctgaacgtgagcgtaactgtgatgggcactttcaacgcctctatcgggccaggcgcctacatgacggaccagtggagtaatactcagttccgtgtatcgtgcaactggggcaactgggcgtatccgttctgctggttcgctatcaccaccatctacgggatgtagtatgatcaccgacagagagtatcagcaagctgctgagatgttgggagtagatgtcccagcgatcaaggcagtgaccaaggtggaggccccggtagggggcttccagcctacaggagagccaacgatcctctacgagcgtcaccagatgtaccgacagctccaggccaaaggtctccccacggaaggtcatcccccagacctggtaaataaggtagctggtgggtatggaaaatacagcgagcaacacgctaaactggcccgcgccgtaaagatcgacagggacagcgccctggagtcctgctcctggggaatgttccagatcatgggctaccactggaagctgatggggtaccctacccttcaagctttcgtaaacgccatgtacgccagcgaaggagcccagatggacgccttctgccggttcatcaaggcacaacccaccacgcatgctgccttgaaagcccatgattgggccaagtttgccagactgtacaacggtccaggctacgccaagaacaagtatgacgtgaaattggagaaagcatatgctgaagctagtggctgaaaaggccaagctgcaccgtagcagtacagtggtgctgagcatcttcctcttcatcctctcgatgctgatcatcttcgagccgctgatcccagggcttgcaggtgttctcggtcccgacctgtaccccaaggtcgtggcaggcgtctccatgctgattgcagcaggccggtacatcgtccaaacctccctccggggcatggtagttcaagtatcggatgagattcccaaggaggaagaggaaaaatgaaactgatgactgccatgcggatagcgttggtagtcctcgttctggggctctcctggcttctccgggagagtcatcagaaaatcgacaggctggagcagagcctggcttctctggaggccagctacgcagaagcatcggcatcgtaccgatccttccgaaagcaatgtctgtccgtgttctcgatgaacgaggaactggtgattcaaaacaagaccctggaggcctctgtgggctccgtggtgcaacgtttggatcggacccctacactgaccctacccgaggtgaaagatgcgcctacgagcgttcctgggcatgtggctactgagcgtctctctcctgggactatggagttgctcaacgaagccttctgtgccgcagcccccgcaggtcatcctgcctgtactcccaaatgagtggacaaccccctgtgtaatctttccggtggaagaggacactgtaaaggccttggccaaggggtacgtcctgaacactggtgcagcaggttgcgccaacaacaaactccacttcatccagcagtggtacaaagacctggaggcccagtatggcagccgcacgcagtaacaacgaagactcccagtggaagtatgtactggacctggcagcaaagttcctcctacccctgctgatggcatgggccacctggcaacagacgcagatcggtaaggtggaggataggctgtatgccctccaagctgttgctgtgaccgagcaaaaactggttgccacggaaagccgtatcctgaactacctggatgttcggctaggggacctggacaagaagatggaggtcaatcagaaatactccgaaatgatcatccagatgatgaagcaggagcggtaaacgagaggtgtcctcatgacgaaggcccacgaaatcaccgtcctggggatgctcttcgctacactgctgactctggtggtcggtttgggagttctggtctactacgctcaacgggtgaccagcaccgagtaccagttcgacatcatccggaaggagtaccggctcagcctggaagagatgcggcgagacttcgatatccgaacaaacagactgcaagagcaaatcaatgccatgcagtataccacgtctaagcagatgcggctgcttcaagaagagcaggacaacctcaagcggaaaagatgagccccactggccacaagctggtggggctttttcacgcccggagaaaagtagttgacatcccccacaacaccctatacagtggccacatcaacagcttgaggaggttccatggataaggtttacatcgacgcaacatttgacattgaatcggtgatcgccgagccggatgggatagtgtactcggactaccacaaagggactcccttaggagtaaccgccactctccgtgtgaacatgcccaaacgggattccaacagggtgtggaagactctcttggccatggatttctcggccctggagcagcgtgtattggcagccatgctgacttctggagggttggttatgcttctagaggatggtaagctgtacgatcagaacggcgcccaggtagaggacccccgtgataagctcgtggtgatcttcgatgagtgggacaagctttccaaaaatcagcgccacctgcgcgccaagaagcaccgtacagcccccaagaaccctcaactgcgaaagaatcactggaaccgttgacacaggaatataaaggaggaacaatgaagaacagtacagcagccctcggactggcatgtgcgctggcaacaatgctcaccctgccatccccgtaccctgctacgctgaacagccggtgggaggttgaagtcccggcccaggaggaatcgaccgacaagaagaaggccaagaaaaagaaactgaaggcccttcaagctgaagctgttaagtcgcgtaagggaggtaagaagtgactaaaccgctcgatccgcctccgacagtggagtatattcgaacgactcggaaggcccctccaccgcctcctccaagccctgctgtgaggtgggtgaaagaagggacgactttggatgaactagcgagggatttgaaattgcaacatatgaaagcatggtctgtcgtggttttagcagttatcctggcactcaccatgatgttttccttcctgggcatgatgcagcgcttggaagagaaccaagtgaagctcgaatctgagaaggtgcaagccgtgaaagaggcaatcaccaaatgcgaggcgggagctggagtgttggaagtgactctgaaaggagaccggctgactttctacacttgcaagttctcgaagtagctgttatgattccagacctcaaggaggcttaccagaaagcctccaagaggactaagctgttgatactggcggccttggttagccaagcagcgatagccctctacgaacaagatcgaaggtctttaaaagacccccacctgtccaggatgtgtttcgtacaacaaggggtttttgaagttacccgaacaggccctatcacccgcatctattgcaagaaaggagagtaaagatggtaattttcaccaaagaacgaaacaacttggccaatagcgcaatgatcgctatcaaccccaaacacgtcaccgggctggaaatccctgcgtcgaaggaagaagtccgagtaggcctcacaagcgggattattatcctgagcttcctcacagcccaagatgccaaacaagccttcgaaactctgactttcgcctgctaaggaggtaccaatggaactcgacatccgccaacccaaccctcccttcgataccatccggattgcggatatcagcgacgatatgagcaatgtgtgcctgatcacgtgcaaagaggcccctcccggagctgtgcgcttggtgtaccccgatgaaggacaagctacatttggaatgccgggagatatcgtgcaacaagagcttctggtggaggacaagatgcacgccgacttccttatcaaggcgctggaaaaggctatcgagttggggtggctgaagtgatgggactgccgatctacctgagcgttagcgtctaccacttggcaggccttatcgcagtcgcctgcctggtctactggggtatcatcaagatgacccggagcgaggttgaacgaggaaacatgaccaagccgcaagcgtcctggtggcgtaagtggtaccccgtgtgggctatcgtctgcatctcggtatcgtgcctgggcttcggctacaaggtggaagagattcgcccggtgggcacgttccaatcccatcccacaactgttgacacaggggagaaggaggagtatcgttcataccgtgaaaaggcagaagagcggttcaacaagaccctcgaagccatcgaaacgaaaaacaacctgaagtaaggaggaaagatgttcaagaacctgatgcgtggcgtcgccattgtcctggccctggccctggttgcaggctgctcggatgtggtaccgcctgccatgaaaggcaagcacctcagcggtagtggctacagcaccaacgtcctcgaacctggccgtcactggcgtgccccgtggactcgtatcgtgatgctggatgtctccacccagaccgtcgccgagcccctgaaagtgaagatggccgacaatctggacctgacgttcgtggtacgcttccgtactcgaatcgccggcaccgagcgcaccatcaatgccatgttcaacgatatccgggtggagaatgaccgagtaactctccagcaggtgtatggtgtctacggtaaggatgtggtacaacgtgtcagccgctcggtcctgggcaagtaccgcacccaggatgtagcagccaacttcgacgagattaaccaagccctgcactcccaactggtagcagcaatggagggtagccctttggaggtgagcaacatcaccttggctgacctgcaatacccggaagtgatcacgaaggctatcgaagctcagaacgagcgggagctggctatcaagaccgccgaaaacgaacaggctatcgagatggtcaagcgtgagaacgccctgaagctggcccaggcggatcgtgaaatcgaactgaccaaggcacgtaccctggccgaccagaacgaaatcaccaaccgaggcctgtcggagcgactgctccagtacaaggcgctggaagttcagatggaaatgaccaagaactcctctgcggtgttcgtaccctatgaggctatgaccagccccggcttccagaaccgcgtctacaagtgaccaacaggggccagccaggctggccccatttcttttgaaggaggatgcatggaacataaagcgttggaaggtgttaaacacagaacgtgggaagtggtggatagcgagtttgacggagtttacatccgagaagccctccctaaagtgaggggtggatacctgatcgagtacgtgattgcctctgatgttaaggaagagcatgctgctaccctgtgtgctgcccgggagatgaaagcggagctggagcgtctgtgtcggatgagtgagtccagccttatccttttgggctgggaagaaaaggacattaagagcgtcctcgctcccgcaaaagaagccctggccttggccaacaaaaactgggagaagtaagatggacgtgatggacgacgattttgagtgccctgatatcctcccggagtgggctgaagagtttcacccctcggaaggaaagcaccagataggggcccagttggcgactaaggatggacgagtaactgggaatggggtgatcttctgtgctgtgccgtggaaattctaccctaagcttgacctgttccttgtggtaacggatgcaggaaacgttctcaagttgaccgaggccgagttgcacagcctcttccattggccacaatatatcgccgacctcaaccagaagacgccggctgaggtgatgtacaccgtcaaaacaggtccaatcggggaccttattcaagatttccaggaggaaaacggacatgcgtaaactatcttcaattcgtcaagtgtcaggtatcgaacccatcgagggtgcagaccggatcgagaaggccttcttcgggggctggaccaccatcgtcccaaaaggcgtgctgtcccccggcgacctggcagtctactttgagattgacagccttctacctgtggcagacccggcgttctcccaccttaccaagaacctggtgaaggttacccggaagaaagaagcctgctccctgggtatggattgtgagatggcaggagtgtgttatgccgtgtcgcaaggctgccccagcgagtgtggaggcgaagaggaggtggtatactcccgactgcggaccatgaaaatgcgaggtgtcacctcacaaggcttggcccttcctctacgagccttcccaggccgcctggcccagttggaagctggcatccttcgccggctccagaaagcgcccgtgcaagaggtgttggacgatctgaacgagaagatgccgctggatgaaatgctcggtgtgctgaagtacgagaaacctgaagaggtggcggcagggaacagtaatgtctcccgtgtcagcacgttccctcgatacatcccgaagacggaccaggaacgggttcagaacatccctctggagaagatcatcgcagatgggccgtaccaggtgaccgtcaagatggatggctccagttgcactgtgtgggtaaatgaagacggtgttggcatggcaagccggaatcaaaccctggtggagcctacctggactgatttccccagtttcgaggattgcaaccactttggccaggctgtactggatcaggacattcctcgcaagttggcagagttctatgaactcagcaaacagccgttcgcaattcaaggcgaggtgtgtggcccggctatccagggcaacaaggagaaactggagaaacccaccttcttcttgttcagtgtcttcaacatcaaggagggtgcctacgagtccccagagtattgcaggatgctggcggaaactctcgatattaagcatgtgcctgtgctctcgactcagcatgtgtttgaagatgtcacttatgccgacatccttgccatggctgaaggtaagagctataatcctgccaccaacagggaaggccttgttttcacagcggtagacaagaaccgctacggtcactacccccatttcaaagctatcagccaatcttggctggcgaaacacgagtaaggagagtccatgcagtcgcagttccaaaacatcctgaaatccctggaaatcgctcgtcagattcgggatgacgaagagttcgcccggctggtcgagctgggcatggttcaggcggacatcatgaatgagtcgttctactgggttgacatgcagggccgtttcaggcagtatactcctcacggcttcgaacactgatcaacatggcccggctagtccgggccttacaggaggaaacatgagcgaaatcaacttttatcccgtatctgctgagaatatttaccccggcctgacccaggcggcaaagatcgtcctgctgatggttctgcctgagcttcgaggaatcatctgcccagacacaggtgaacgtctgcgggagggcttgggaatgcatggtatcctggagtgcgtatgggaaagccgccacaaggttcatgccatggaccagtgggccaacttcatgcaagggtacaagtccgaaatgccgggctccagcgacatgtatgaccaaattcaacgagtgttgccttcccggaacatgctgaaacaaatgatcttaccgtacctggaggcttgcaaacgtcaaacccgcgaagagcgtattgcacaggagaagtaccatgagcaaatttgaaatgcttgacctggtgtgcattcatccggacccggaagtgtctgggagcaagggcacgctattcggggaattccgggagaaaggtgccatcggtatcgtgttctacatcccccacgggatcagcacaaccggcaaggttaagaacctctgcaatgaaaaaggatacgggatcgtctggcatgttgacggacgccttcgcgttatgtacgccgtaccaggggattttctggtaccctacaatggcctgcgccaggaggatgatttcccgtggtctgaactccctcttcctggggaagtcatcctcttccgagaagaggagtatgtggatggggtaggaggtagtgccaataaagtccagtatgacaccgtttcaactggggctgtgttcggttactccccggacatgaaatttctgctggtgtcggtactccctcacggggatgaagaggaggtctctgtagaaaacgtgatcggactgagactgtccatcacagaccggatgccggaggagggatatcaataatggcaaagctgaagctggatggtaatatcctcaccgtaatgggcctcacggcaggccaggcagtcgagaaggtgaagcaacgtatccgaatggatgttgactttacccaggtaactgtggtacagtctggtcctggagtcttccaagtctcttaccctttgaacaagggcgagcgtggaagctacaagcacctctatgacaagcaggagaaggagcgtaaggcgaacaacccgcctcccgagccaccacccctcctgctggcgtaaccctcagggccctccgtgggccctttttattgcagaaggagtaggaagtgctgattgggaagttcgcctgtgtcctgccaggatgtgatagcagcgacgctatggcggtctacgaggacgagccgggggtcttcggtggacgctgtttcagttgtgatcgaatggtttcgaacaacaccctggcaaggtctcccctgggggaagagttgggagcagtgatcatcaaaggtgatcgacgtgcccaggcccagaggaggaaagaggagaaagaagtgagagagattcaacgcaagcccgtcatcactgccgaagaccgggagaaaatccaaggcaacggcggggctgacacgaccctgttccggggcatagcccggcagaccaacgagaagtacgggtgtatcacacactacgcagacaacgagcctgtggtgcgatattatccgatccatgaccacggtgagctggtaggatacaaggttcgtcaggttcccaagtccttctatgccatcggtcggaacgacaaacactgcgagctttatggtcaacacctgttccctgccggaggcaaatacctcctcattgtaggcggagaggaggatgctcatgcagcttaccagatgctccgagttgatcagctccagcgctggaagaagaagaacccttacgcggacatcgcagatgcaccgttgccgtatccagtcgtaagtccgactgtgggtgaaacctcggcagccagccagttggctgccaactatgagtacatcaactctttcgacgaaatcatcctcatgttcgacgcggatgagaagggagagcagggtgctcaggcggcgctggaagtgctgcccatggggaaggtacggattgccaacctcccagggaaggaccccaacaagatgttggaggacaagcaggccaaggcgttcatcaatgccttcttcgacgcccgcaaggcatccccggcaggcatcgtggggtcgggtcagattcgagaggctatgcttaacaaggcaatggcgcctaagctgcccctgccctcgttcctgtacgagctgtctcggaagaccgctggaggtttcccgctgaactccatcgtcaacctgatcgcaggctccggcatcggtaagaccacctgggtcaacgaactggtgtaccattggattttcaacagtccttacaagatgggcatcgtcaccctggaggccgacatcgcagagtacgggggctacctgctgtcccggcacctgggacagaagctggccctgatcgaggaccctcaggagtacctggcaacaatcgaatctgacagggtagagcaggcgagtaacgagctgttcctcaacgctgatgggtctgaccggttcctgctggtggatgatcggggggaccacgatgcgatcaagcagaagattgagcagatgatcatttcggggggcatccaggtgatcgtccttgacccaatgtccgacctgatcgacgggatggacacaggtgaacaggcgttgttcatgaagtggcagaagcagatggtgaaggcttacgatgtaatcttcatcaacgtcaaccacacccgtaagggcaaggacaacaagactgctgcaagccggggcgctgagctgagcgaggaagacatcattggctcctcgaccatctacaagtcgggcaacatcaacatcaccctggtgcgaaacaagcacgcggaggacgatttggaacggaacaccaccctggtgacccttaccaaatgccgccacacagggtacaccgggccagcggggagggtcctgtacaacatcaagacacacaccttgatttccctgacggacttcctcaaccagcaggtggaggagtacaaccaggtacatggagagtctgaggggttagagcaataccctgaagcagaatgtgtcgagcaagttcattcgccggaagatgtggctcccgtctaccctcagttggacggcccgccgccgaccggggacgatgatatcccgttctaagacggatgaaaggaggagtaacgtggaagaggtacagaaacgccgggtagtattcgatatcgaggctaccgggctgatcggagaggggacggtggattacaccgcctcaccctggcgcctgaaagaggatttcaagctacactgtgctgtagctcgggacattgacaccgacgaggtgttcaagtggggtcctgacgaggtgatggacttcgccaaatggctgggtgaggagtgctcggtcgtaattggccacaacattatcaactacgacttgctggctctgaagctgacatgcgggctggagtacaccatcgggtggggagagaccaaggacaccatcaacggtaaccccgtcaagatcgtggacaccctggtaatctccaaaacccttaaccctgaccgtcgccctggccacggcattggggcttggggtgacaagctgggcctggccaagatcgattggcgtgcgaaggctgtcgaactgggattgattaccgagaacgcccctcgtggtgcagagttcaagacgtatcacccggagatgctggagtacaacgtccgagacgtggatgtcaacctgctggtctacaaagctctgatggcagagtggggtgcatggaactgggctccggcagtccagaccgaaagctacgtggcttgggtggtgacccgtcaaagtcacagggggttcttcttcgacgagcgcctggcccaggccaacgtccgggagctggatcaactgatggaggagtgtcgtgccattgttgaaccgatccttcccccgaagaagccgaccaagacggaagctgccaagtattgcttcccgaagacccaggagaagaagatcaagggcggtctgggactctccagcaacatggagaagttcctggagaagatgggcggtaagcaccttccacgttcggggccggatgctcccaactacgtggaaatcaacggcaggacgtatggcctaccgttcgatcatacggtaagcttgcttaccgaggtgcctgccaagatcagcgatacaacccacatcaagggttggctggtggatatgggatgggacccgacttcgtggaaggagcgtgatctttcgtcggatcagaagacaaaggcccagctacctttcgagaagttcgaaaaggtggtgacctcgtacatcgagcaaacctatgcaagcccgttcaagaagtaccgcctggagcacctgaaagagaagctgcgtgctaagtggtccctggccttcatgatggacaacccagacatcgttctggagtacatcctggagcgaggcaatgaccggcagttgaaggtgtggaccaacccggagttcaccgtaggtcaggacaaggacctctgtcccgccctggaacgaatctccgagaagttccctcacgttcggcacgtgaccaactacctgacgtatcgccatcgtcggaactcgatcctaggtggtgggtatgacccggacgacctggacgaagacggcatgcctgtcaaggggtacatggcctaccagcgtgaagatggtcggattgcaactccggcagacagttgtggtgctggtaccagccggttcaaacacaagcaggtggccaacattcctcgtgtgacctcgctgtacggggtaccgatgcgaaacctgttcggcgtggacaccaacaagtgttggcagattggctacgactttgactccctggaagcgaagatcgaagcccactactgcctgagcacggcaatgcgtctcagccctgctgcggcacagaagctcaagatcaagtttgggtccaacttcgccaagtaccgggaagcgtgcatccaggcagcgcaagagtatgcggtagcgcttgtggctgagaagcccaacgatattcacacggtgacggcggcgaagatttccaccatcatcggaggagacttcagtcgtaccaatgccaagtcggtcaagtatggctgctcctacggggctcaggtggctcgtgtagcgaagatcgtcggctgctctatgcaggaggcccaggccatcttcgacgccttctgggaggctgctagcccccttgcgctgctgaagacggttctcaccgacttctggaaggagaaggggaacaagaagttcatcgttgggatcgatggccgccagattcctacccgttcggagcatgctctggtcaacagcctgttccaatcggcaggtgttatctgcgccaaggtggcgatgatcatgcacgaccagaagctgatggctgaaggtctgctggtagacttctggaaggacgactggaagaacaagtcgtactgccagcagctcatcgcttaccacgatgagagccagttggaagtgaccaaggatttggtcaagttcaagatgttctccaaggaagccttgggctggcaagagatgcagcacgaggacccagaggagcagaagaagcttcagaagaaggaagacgctcgatgcaaggccctggtccagcagtggaaggacgagatggaagagtcctcgggtcaaatctggagcgacatcggagagtccccgaagggcggttggttcgtaggctacagtcgggcaggggagacggctatcgaggctgtcaaagctgctggtgagcacttcaagctacgagtagacctgtccgcagggtacatgttgggaaccacgtggggcacctgccactaaggtgcctggaggaaatatgagcaagaaaggtaatagcgaaccgacagggatggcgatcctggattacgtgaacatgcgtcaccaggaattggaagacttcctcctgtactgggtagagaaccatgccaaggggaagaactttcctttggagatgcccaacgacgcggagtggtttgaacacgaactagcctacctgacggtggaaggtatccgagaggcttgacattgcctctggattgtgcttcaataggctcctcgctgcaacaatgcgcggggagctagcaacctgaagtatgtgagtttttgataaaagtccttgactttcaatagcttatatgcttcaatagcgttccaaatgaggaggacatcatgtctattcaagtagaggagaccaccgaatatgtggtctgcaacaagtacaacctgaccagccggtcctacgccttcagcctccgggaagacgcccggaagatgaaagctcaactgggtggcaagcagctagggtggatcatcgagcgaattactcgcaagattgtcaccgaagaagttcgctaacaagcgacaaaccccccgattaggggcaactaccgcccgatagggtaattgataggagaagtaaaacatggcactgcgtcccaaaagcactggcaacaccggcaccccgcgtgagttcgtcaacctccccgagccgaccccgggcaaccacgaagcccgcgtctcgctgatcgtctacctgggcgagcaaaaccgggaagacttcgttgatgagaacggtgagagcaaagctcagaagcctgtggatcaggtggcagtattcgccgacctggtggaagaagtagtggactacggtggtgacatcggtgagcaacagtaccgcctgatgctgaacaagtccttccgtggtgaagtgagtggtatcaccctccaggcgaccccgccacgtgacggcgaaggccgtatcgtcgaaggtggcatctggacctaccacccgaacagcccgctgaccaagctggcgaaagcaatgcaaccgggtgcagcaaccgcgatcctggacggtaccgacctggatatcgagccgctgctgaaccaaccgttcatgtgtactgtgaacgtcaagaagaccccggcgaagaacgacaagaaggacaaggacggcaacccgctcgtctataccaacgtcagcttcggtggcgcgacccaggtcccggccaagatgatgcgtgcaggtgtagctgagcttcgtcagaagcctctcctgatcgacttcgacaacgtgactatcgagaccgcccgcctgctccgccgcgatgtgattcgcaagattcagcaggctaacaacctggctggcacccgtatggaagccgttctccgtgaactggccaaggaacgcggcgacaaggcaccggaagccaaagaagctcccgcaccgcgccccgtagcaacccagcagagcgctcctccggctcagggtcctgcttcggacgtggacagcttcgacgacgatattccgttctaagacggaaccctcagggcccttcggggccctttcttttactccaaaggaggagatgagaatggaagattacgtggtgatcaagtgccgcgttcacactggtttcgcagggggcatccatgaagatgaagaacacctgccacgagacgagtgggaagagatgtcagagaaagagagggaggggttcctggatcggttcgcccaggacatggtaagcaactacatcgatgcccacgcgtgggtggaggaagagtaaatggcacagaacaacactctcgttgtgaatgaccagcacaacgtcttcgtcctacggctgccgcaggcctattttggccatgacattccggtagccatgaaagaggatttccagtattggaaagagcagctacatcttattgctcaaggctccaaaagcacgctgatgattcccagcacaactgacccggaatctcgtcagccgctgttcgacttccaaatcctgcctcggaaaactgagcaggtttcccccagcaccatcaacatccagaactgaaggagagaatcatggaaaactacaacgacgcacgtgaaggtcagatgaccgagaaggacctgttcgaccgcctggtgaccctgcaccgtgaaaagctgaccaacgccgaagaccgttcgcagctcaagaaggatgccaaggagcacggcctggacaaggaccgtatcaagctgatcgacaaggcagcagcccacgacgcgaagcgcgacttcgaggagaaagactatgagttctcccagcttcgtcaggtttacgaggaactctcggaggacgcataatgtcccaaccggcagatacaattgccgtaatcgacggtgacgagtgggcctttaaggcctgctctgccgcagaggggcgtgctatcatagcgaagcacatccccagcggtagggagaaggagttcaaccatcgcacggaattccgagacttcctgaagacccagcacggtgggaagttcactgaggatcagttcgaaattcgggatgtccagtacccggaacccatcgagaacgtcctgttcaccctcaagcagatgattgccggggtgtgtgctgaggtgaatgccacgggctaccaggttctgatttcgggcccggacaacttccgactcgacatcgaccttcccaagcgctaccgcacccctcccaacaagcgagcgccgaacggcactgagaaggcgggacgctacaaagagtcccggggggattccctccgtccggtacacttgagcgacgccaagaagtacctgatcaaaaagcatggggcactgaccacttatcgctgcgaggccgacgatgctcttgcaacccgagggtacgccgggcgtattgccgagctgaagggtgctgctcagtggatcatcccctgcacacaggacaaggatgcgatgggtgtggagagtcgtctctacaaccccaacaagcctggcctgggcatcatggataacagggggtttggccagctcgtcgagatgggtaaggatatcaaggggcatggtcggatgtggctgtacttccagattctcctgggagacagtacggacaactacaacccccgtgacatcctggagtgggccacctaccaggccggaggcactccaaagccctttggggagaagaaggtctactctgtcctgaaggattgccaggacgaccgggatgcctggaaggcaatgtacgaccaatacaagctctggtatccggaggaagtggagtacgttagctggaccgacgaggttatgcgaaaggacgccattgacatcatgcagatgtacgtggactgcgcccacatgcagcgttgggaaaacgaccgaatcaatgtccggcagacgctggagaaaatgggagtgatagaatgcagcaagtaagccttacagattggctggaagagttggacctggttctcgaaagtcgcggcctgccgtcagcccatgcgtacttcctggaaggcctgtacggggactactatgaccaaggcctgactcccgaggaggcagtcgaagaggagttcggctgatggagacggtcaccgagaaaggcaagttgtgggggtggttcccccacctgtacttcgttcgggcgggtgtcatctgcgtgatccaactaggacccctgaagctgtccaaggtgggggctatctacggcatgggcctgttcaaccggctgttgttccagtggggtgggagatgagtgttcgtcgccgaccctgggaagagcttccagaggtttggaagactgaggcttcattcctgtcctggctgcgaggaggtatccgtcgcgccatgtggatgaggcacccggtcaagctggagttcatcaagaacaactctgtggagatggtgaacaccaacccgagaagcatgaagcggttcccaaccgtaaaaggcgcccagtgctccaaatgtggggaggtgaagcgtgcagcggacatggaagtcgatcaccggacaggggagttcagtcttcgatctattgaggacctgcaaaggttcatcgaaggtgtggtgctggtaggtatggatgacctggcatggctttgtaagccgtgccatgaaatcaagactcacatggagcggcaaggtttccatacctggggagaagcccaggctgacaaggaagccatcgccattggcaagaaaggcgtgaatgttgtcaaggcatggctgaaagagcgaggggtagagcctggcaccacagcggctaagcgtcgggatcaaatcttcgccatcctgaaggaggagtacaagtgacccaacggtgcatgttccggcaggatgattcctgccactggtacctggtcccggaagcagagtgcaggcggttcgatgagctgtgtgccctgatcaccggggaattagagccggactcggaagagtggtttgacgccatctgcgagttcgacaacagctatggccacctccgttgtggtcacccgtccaattacgtcatcacggcgcactaaggagatttcatgaaaccgtggcacaataccgctctagaactggcagcagccgggaagtcctggcgtcagattgccgtggagctgggcatggccaagtccactgtgagcgacttcctacgaactcagaagatcaacgagaacaagccgatgcccaaggtgctgatcctcgacatcgagacggctccggctatcggctattactggagccgctggaagaccacagtgggccagaaccaggtgttgcaagaaggttatttgctcaccttctcggccaagtggctgggcagcgatgatatcctggagtgcaagcttccggatttcgacctgtacaacaccgagccgaagaatgaccgagagcttctcaaggtcctggcaggcctgctggatgaggcagacttcgtggtggcgcacaatggccgcaagttcgacctgccgacgatcaatgctcacctggtgaagcacgatatcttgcctcccagcccgtacaagatcatcgacacgtgcgacattgccaagaaggtgttcaagttcccgagcaactctctgaagtccctggcgattttcctgaagtgtcagcacgataagcttgatactggcggtttcgagctgtgggcgagagtcatggatggagaccccgaggcttgggaccacatgatggagtacaacgtcttcgacgtgattgtcctggaggaggtttacttgaagctgcgtgcgtggtataatacccacccgtcgctctctgcgttgatccctcagaaggtcactccccattgccctgtgtgctgctcggacgacttgcgtccaacgggcaaactgtactacaccgcagtgtcggccttcgaggttctccgctgccatagttgtgggaagcactcccgcactcgtcagaatgtcttggaccgggaacacctggtagtcggcatctgattcaaagcccaccttcgggtgggctctttcatatctacaaggagaattcacgcatgatcatgagcgatctgctcgacgccccagagaagcccgaaaccaccgagatggaagtgtccatcgatcaggagctgggggctgacctactgatgtggttggaaaagaactaccctgacaccccgatgatcactgtgtatgtcactctgctggctgccacgcagatgattgccgaaacgatgaaggtggcatccacctccctggacgaaggagtcaagctgtgaaactgggaccctctgtaatgatcactgccagcgagtatgtcgcttccaaagaagcggcagagatgttcaaaacccttggaagcccgtctggatgggtaaaccctgtagccccttccgaagatgagggggaacacacgggaggttcttccagctactaccaagtggaggtgcgtaatcccacctctggcggagaaccgtacatcggggagtgcaacgattttatcgaggcactagacatgaccttcgccgaagcgaacgtgttcaaggcaatctggcgaaaagcagccgagcgcaccctgggtaagaaaaagaagggcaacaacgctgtctatgatgccgagaagatggtattcttctctcaacgggagctgattcagacccgtgccaaagcagaaacgaagaaggagtaaccaatgaaagcgagcgtgatcgccaaaagcatttcctatccaggtacatcacagttcccggtaacaatcaccaccttcgagctggagtatccccggttcatccacgccgagctgatgacgcaccacgctctcttcaagaactgtgcctccagccgggctatccccaccaagaagctcattgagcaggtgcggaataacccagctatgccagtccattggggtgctaaccaggccggcatgcaagctcacaaggagctgtcgaagcctcttcaggtggcagccaagtatctctggatcaaagctgccaaggccgccgctgggatggccctggctatgcacaaggttggactgcacaagcagattgtcaaccgggtgcttgagcctttccagatgatgaagacggtagtgaccgctaccgagtgggagaacttctactggctccgtgatcacgaagacgcccagccggagttccagcacctggctcgaatgatgaaggaggccactgccggggtggcccctgaattactggtccctggtcaatggcacgttccctatgtgaaaacagagttcatcccgggcatgggccggcaatacttcgatgagaacggggagatcatctctgtagagcaagcgttgaagctttctgcaagctgctgtgctcagaccagctaccgggccactgacaagagccaggacaaggccgaagtgatcttcgacaagctgatcaatagcgagccagttcacgccagtcctaccgagcaccaggccacccccatgcatatagcaggtggctgggagaagggtgtgacccaccaggatcgtgatggttgttactggtcctccggcctgagaggttggattcagcatcgtcaactaattccgaacaattgcaagaaggggtaaactgtgagtcaaggtaaggtcgagttttcgctgtccgtgtcggacctgcggctggtaactggtttcaaagaggcgttcgctgcctaccaggcaggtaaccccaaggtcttggcagccctgctgtaccgcaacggcatggacaccacacagccctacgaagtggttcaccgggaacaccggaacctccgtgggcaacatatctccggcgaacgtttcgaaggctatgagcgactggacgagagctggatcaagaagggggcaccgagcgaggaggcaatcatcgcctctgccaaggacggtagcctccgtgacgagctgatccacatgggtcggcgactaaaccctgcacaggctatggtggatttcctgaatgagtgagagtgttcagccgtataacggcattctgattgattattccctggaccggacgatcccggaacaaggattggcgatgctcacctcggacggcttctacaagaaggaacacgagacatcgcctcaacaaacgctgtcacgagcagcggtgagctattgcttcggtgactacgattttgctcagcggatgtatggttatttcagccggcagtgggcagtgcctgcaagcccggtacaaaccaacgccctggacatcgagtggcccaatttcaccgaagagcagtttgacgaagcaggggactggcttcaagaaaacatcgataccaccgggatgcccatcagttgcttcctatcgatgatcgcggacagccgtaaaggcctcacaacggcctctggtgaagcgaaagagttgagcatggctggtggtggggtaggcgtctacgcaggcatcagggccccggatgagctgtctacgggcgtcattgagcacgctggggactacgatgtcatgtgccgggcttaccgtcagacccgtactcgtcgtggcagcatggccatgtacttggacgtggctcaccccgagttccctgtgttcctccaaatgcggaacccggtaggcggtgacccgaagctgaagcgcttcaacctgaacaacggtgctaacatcccggacgccttcatggaggcggtcatcaagggtgaggattgggagttcgttgatcccaaacacggtaagactggacgtaaggttccggcacgtgagctatgggaagagatgcttcaggttcgtaaggacacgggcgagccgttcatgttgttcgtggacacggtgaaccgtaacctgccggaatgcatcactcatccgttgtaccgggtacgacagagtaacctgtgctccgaaatcactctgtacaccagcttcaagcgtactgcggtgtgctgcctgtcgagtgttaacctgggcacctacgatgagtggaaggacgatccgctgtttatcgcagacatggttcggttcctggacaacgtgctggagttcttcatccgcctggcacctccgagcatgcaccgggccgtacactccgcctccaaggagcgtgcaattggcttgggaaccatgggcttccatactctgctacaacagcgtatgatcccgttcgaatctggtggtatgggcggcatgcagcagctcaactatcaggtttacaagcaaatcaaggagcaggccgtacaggccagcttggagctgggacgctcccgtggggaggctccggactgccagggaagcgggcgtcggaatagccacttgctggcgattgctccgaatgccaacagctccagcctggtcaacgtgtctccgtccactgaaccctgggcaggcaactgcttcaacgctcaaggccgggcggggagcttcctgatcaaaaacgaatacctccggcgagagctggaaaaagtcggcctggacaccaaggaaacctggcgttcgatcaacgatgctgaaggctcttgccagcacatcgaaggtttgagcgacgaggtgaaagcggtgttcaagacgatccgggagattagcccaatgtggttgattgaggcagcagcagggcgtcaacccttcatctgccagtctcagtcggtcaacttgtacgttcacccggacatcacgctgcaagagatgtcggacatccacatctatgcgtggcacaaggggctgaagagcctctactactgccgctccaaggcggcgaagagcatgaaggttggtaccgggggcgctgagcctctgaatgccctcccagtgcgatacacaatctccctggacgaggacacttgcctgtcctgccaagggtaaggagcacacatggcgttaaccgtggaaaactgtctggcgttgcagtacaagtacgtcaacttcagttatccgatcacgatgaacgaagacatgatgttcgtggtgccaattccaccatacaacacctacttcctcatcgacgcaatggaccattcctccactcacggaggttcccaactcaagctgctgattgcgggctggttcctgttcccgcctaccgctagctatgagtggaacatcatgggcgttgccgaggctgaaaagaacgagctgttcatccctcacgaggtggaagaggcagacatcatcctcaacccgatgcaacccccgccagaaggccagatgtggccgcatgaaatctggactgggcagtaaaacaaaggggccttcgggccccttctttgaaaggagagattgtgagcgtatttgttgaaagcaccagttaccgtccctttgtttacccttgggcagtcgaggcagctcgggtccatgccatcgatatgcattgggatgttcaccaggcagacctgacagacgacaagcagcagtatttcagcacctcagggctcgggaccaaccaggttccccacgagaaccacaagtggctgctggacaaaaccctgtccatgttcaccgagatggaccggacagtcggcgagggctacaccaagctcctcccgtacatcaagaacaatgagattcgaaactggctcattactgccgcctcccgtgaggtggttcaccagcgagcttatgccctggcagccgaggagttcgggttcaccgatggcgattggaaagcttttgcctcctacaaggagatgcgagacaagctggaggtgatgggagagaatcgtatagacgcaagctggtccgagcccctccaggccgcttgcatcctggcccaacttctgaccggcgaaggtgtaggcctgttcggtgcgttcactgtgctgctgaacatgaagcgttgcggcaagctgatcgggttcaacgacatcaaccagtggagcctggcggatgagaccgaccacgtggagaagaatatccgcgtcctgaaagccatgcgtaaggaccttaccccggaagagaatgcgatcttggaccaggaaatccgatacctgatcgaagactaccgggaagccgaggtcaagtatctggtcctggctttcgagaagggccctcagcatgacctgaccttcgagcagactgtcgagtacatcgactatctgtgccgcctgaggctcttcgaatgcgagcttctcaaggagcaccaggtgggtgagaacccgttgccctggatggagtggatgatcaacgccgcccgacacgacaacttcttcgagaagaaggtgacggactatagccactccaagctgagcggtgatgtggattactccaagtacaatttcatgttgactagccgagccggttgacctatcatagcccccatgagctgaagagccgtgggggctttttcgtacctggaggattttatggcatctcttttcattcttagaatcgaaacggtgtgtggcaagggtatgtatgccgacgaactgagtagcagggtgcaatccaaggtcctccaggggctaggatacccccgatggcaggctaccggtctctatatcgatctttgcatgtgtttagataaggagaaggagctacatcccgtccccgaggaagacatccccgggtgggaagaccttgccaagaatgaaaaagagatgctcacttactatttcggcttcagttcctgggagcaagcgcgggagtgggtaggcttgcgtgctttcaacgagatgggtatgctaggggctaacctttgcatttacgagatgaaagaggaagatgtcctgctgggagggaaacaggccgccttcaaaatggccaacgctctccgggtgttgaagatgcccattaacaagggcatgcaagatttgatatgggaggagattgaagggtatgacgactaagctgctacgtttccaggcagagagccctaaaggggagaagatcacattttccttgaactggtggtcagacgggagtacaatctggtatcgtatccaggcagaccggggagcttcccgggcttacaccgacatcccttgccagcaagaggccatgaaggaccttatggaggctcgggaggtgtgggtccgggaagggttcctagacaagttcacctcatttacaacgaaaggaggagttggattccatgagtaaagaaatcgaagcgtttgacgtggcaggccgccgactgcatgtgggcgaccaggtggctatcgccagcaccgcagggaaggctactgagatggtagtcaccactgtggaagctgtccgggcgaagacggtaatcctgaaacatccgactgcctggggtgctcaaacctctcggcgtcactcggctgtgtgcaagattcccgaactggctggaaaggaggtgtaaagtgaacaagaccatacgtgctcagctcaacaaccactacgaccggcaggggctgacgggcaatcatcgccgtctggcaatgaaggctgacctccggctggtcagggagcggactgaccatgacatggcggagtggttgcagacgggagaaggtatgttcgtgggtttgaagagcgcctttgtgtggagtaacacccgggaaggctatgacttttggctggataagaacggccaaaactgttgacaggatgtacggggccgggtaaactggccctatttcaaccgggaggtaaagatgaacgatcaaaactacgattttcatgcagaggggaaattccccgcccattgcgacgaacgggctgaacgcttcttctctctggttttcgtagggaagagcgtcaagggtgcggataagtacggctacacctacagttggaactcccgccacgccgaccttcaacctacttccacccttcaacagcgcggggcccactcctgctccttctgtggtcgtgctgctctacctgtccagaacagaggggatcgatttgcagggtacgactactccgtcgaggggtacacctgcatctgctccggcgccatggacgagcttgactggattgttcaggcccagaggatgaagaaacgtcaccaggaggaagtggaagagatgttgcttcaacgtccggtacctccaaaagatgtccgccaggagctgacaaaaaatcgtctgatgaggttgctttctgacgtggagaatagtaaccttgtctccgcaatgaggctcctggagataacctccaaccgcccctcagtatggaacgaaagctatgaacacttgggcagctaaacgccaggaagagatggtagcctgcgggtactctttcaaaaagcacgaagatgggtattgggagtgccgggacgaagagggcaccctcatcgagactcaccgccaactgggcaaactgatttcactgatggccagctccctgggcatcgattaggaggattccatgcaagacctgtatagccaacaccgcgccgctgtcaagaaactcctccaagaggggcgaaagctgaaggcgacctacgtcatgaccctctacatggagggttccagcccgaaggatgaagaccctatggtagcccacctcacgttgggtaaaacctatgatgttatcacagacggcctgtacaaggatggttccttctacgtggtggacgatgagggctgggatcacctgtttcccctggatatcctgcccgaagaagatggatgcccacggttcgatgtgttcgatcactttgtgtttaatgtggagggtcctctctgatgtacgagattcagttgatcaacgactgcaacggttgcactgctactctacaggttgccgatgaagaggcagctctggatttgatggaggagatggagtatgcctggacccgctatggcagtgattggatgccgtcttggttagggtttaatccgaaactctcttgacaacaccggagggctcttatacactgagccctcaaccacctttggaggatttatgaacactgctcaaaccatcgcagacatcctgattcacctcgctgaccgtctgtacactcagaagggtcgatgcctcatcgacgggcgctgcaactatgtagatggccagggaaatcactgtgctgttgggcatcttctcagccaacagtcgtgggagttcgcttccaagtgccacggcggcgtgccatccctggagaacgactgggcgcggcgtaaagatggaagtgtggagactctctatgacgagaagttcttcatcgcagacatcggtgttcgccgccgtctgttggactctttgcagttctaccatgatgagccgtctatgtactggacagtggctaaaagcccgtcattctcaaaggtaagcctcctgttgtctatggtggatttcctgaacactcaaggcctggactttgttgagcgcccccaatctagtgttaagggcttctggtcggaagctaaaggaattcttcgcaatcgggggtaccacgtatgaacaaggctctccttctgaaagaccagttggcagcagccctacgatgtgaagaccataccctgcaaggtgttgtcagttctatcgtgttcggccctacccaggggcttgatcataacggtattgcgatccgtgggccggggcttctaagtgatcaccgggaactggtacagcgagccgacagggtatggatgaacatcgcctaccgtcgagcaggtttgctagtcaacatgaatggctttacccggtctgtggtagatgtgtttattctcaaagacaggtatcacgggctgacagggttgaggtccgtgggtgtgggtgagggatgggcaaatgccctggccatcgactgtgccctgctgaagaagcagttcgaagttattgtcgaaatcccttaccagtacgaggggtgggcaaccgacctggtacgggcgggtgagattcctgaaggtgtgaccatcatgtcctcgggggtgtagatatttgaggggctggggatatttgctctagatatttgggtggccccctatttcgagctagatatttgaaggggcctcccagcctcgctatcacattttaagccggccccctgactcacggcctaggttaggggagaaatcgtctcctaggcccatcagaggagcttccaagtgcatatcactatcatgcgtacatctggtcctgagattcgttgtaagaagtgcgactgccccacccctgcccgggatatcgtagaaggcctctgcccttcctgccggacactcaaggcctgggaggcgctagggcaggctgctcaggagctgtgggcttccactttcaagagcgtcaagatcgattccgttcgtcttgaacaaggtacctgacagattttcacagccgggcgtaaggtactcgacagattttcaccgagcgcccaaggtactcgacagatttttacagagacaggtatcaaaagaactgtcaagtttccctcaccaggtggcccgacccctcggcctcttgtagcacgtcaactccccgctgtagcacgtcactcccccggtaagtagctccctatctatccctctcccgccgaaactacctttcacatgcaatcaccatgccaaccttgaaaagcgggcaggggcggtgtttgtctccggcgcccggcccctccggcctgctttcccgcacgcctacagaatgccaggatgagcctggagtgtcaagccttgggccaggatttttcatcgccgacctggcatgttccttgctacgcttgcgcgttcctctacctggcgttgccagagaaatttcttaaaaagggggttgacttctaaccgttccaccgtagaatgaccctcaagcaaggcaaacaacctgtaggaaggtaaccatgcaaaaagctctctgcaatcaacgtgacctgtacgctgcctataaccgtggcgagtatgaccgcgtggccgtagacctgaatcggtacttccccattgagcgggataatcagtgggaagatggagatgcgaacctgcgtcgtcgcacctatctggtgaagcactcgaagggcgtggccaggtggcacactctctatcgtaatggtcaggttcacggcgtcggcgttatcttcgacgtcaagccggacgaacccttccgaactgcctgaggagagacaagatgtctgtcaaaataggggatatcgtagccatccggggcgaccttcggaaaaagctcgacggaacgtgccaatacacgcccgaacagttggtaggtggtaagttcctcaagcataccggcacgggagaaatatggactggccgagtgagtaagatacaaggtgatatggccaaggtgggaggggcttggcgtgggatcgaattctatgtgccggttgacgaaataaacgcttgacaacctgattccccccagtcagacaatagcacccacaaccccgacagaggtaacacacaatgcaaattcatttctcctcccgtaccgcagcccgtgctttcgtgaagggctcttccttgcctcgccaggtaaccgataacggcgcggaagcttcccgccgctggggagtcaagctgaatatctcccccagcgtccgagtgctgggctgcgaatacctcgcctttggcaaggctggcaatacggtgcctgtctacgtcaagtaacagcagagtgcttttagggttgcccctggacgccgggggcagcttgcctaaatccactccgtaggagataacacgatgaacactgttcaaaaaaccgtcctggctttcgttctgaccactcccctgtctctggctgctggcgccatgatcggcaaggccgttgccctccctcccgcactgaaagctcaagcggtcagcctggagatggcgcatgccaaggacctggcagacaactacgttcccaaaatgaacatcatccataccgctacaggtgctatcgagctgggccaggtgtacggggaccgcttggcgggcgaagtcaaaatggtcgttaagggtaaagtgatggccagtacgcacattaacggtcgcagtgttcagcaagccctggaggaggcagcaggtggcactatcgaagatcgcgtgctgaataaggatgtcactttccgaatcaccatggatcgcctgtaccagtccgaaaacttcccgcagttcacagtagtgatgctgaactcgtctgtctatggcaaagacggtgacagcctaaccgcactggctgcccgcctggaaaaacagcgcctggccacggtgaagttgttcgaagaaacccgaatcctgaaataaagtgttgacacggcatctcgtgtctgtagaataggcatcacagagggggacggtccccctcctcctaaaaggatatcagcatgaccactctcgaccctaaagaactggcacgtcaaggcatgatcaaggaagctgttcaagctttcaaagatatgggcgtagattctccctggaatgccgagaatgtggcaacattccgaaactacgatgtcaccctgggcgaggtggacttgtccgaagaggagttcgtggaagagttggattccatccacgaaggggttaagatagccaacatctctttctctgccggccaagtgctgctaaaaatggaccccatagctttccgttgcgcatgcggggagtatgagtctcaattgaccgaggagttggaggaggcgctgcgagacgaagacgacgattgtatcgaattcttcatcgaccccgccgattgggaagcggttgaagaagaggaagaataagggttgacaaggggccaggaaactcataaactggccccaacaccaacgcactgagggtaacacaacatggtcaagttcgaagagattgcacaacgtttcaagaattcccaacgccgctgggacaagccgggcgtcatggctgccatgcaagaggctgtcaataacgctcccgtcaaggtagtggtagagtccaccagcaaggcgctcaagcccgacacccctaccgttcggatcatcgtccgggagtggatcaaagctcggctcggcgaggagttcacggtgtacgatatcatcccctacgtccaccacctggccacccccagcgatgtgaacaacgccctcaagcactggaaactgcaaggcgtgcaaatcccgaccattcgccagcagcagagggaagcggggaaagctggccgcccgatcaatgtgtatcgttgcgatgagttcgcagcctaacctttcactctgaggagatatatcatgcgtactgacaaatccggcgcccgttccgaacgtaaagaagccatcaaggcgagccgtgagcttcgcaacctgcgaaagaacaagcgtaaccagtgggtcagcaaggactaacctggcgcctggggcgccttccctaaaccctggacattctccagggtttacgaaagatgctctagatgttaccctgcaaccccacatttgaggtttaatcatggtcattgaatgctaccccggacacgtagaatactgtttcgccctggccctgtgctgcgctcgtggagggaccaaagttaaactattccggaccggtaaagagtggggagtgattccgtgccgagacgtttaagagccattccgacctgggtatctgggggagatgaagaagacaccccgcgcaagcctgtcctttcggtgatagaccgggcttgccctatccagcggaagttaaatgccctggaccgagattgcgaggagttacggcgcaagcaagacaccctagagcctgccacttttgaccaactggccaatagcctggaagagcgccggcaagccttgtggaaggccttcgaatccaagtatggcgcagagcctgagggggacagccacgacactatcaaggctttggccgatgccagtatccagcctgcgcagcatgtggacatcggggcactgctgttgctaggactggtggcgttactctttgccgcgtggttgttcaaataaaagatcaaaaagggcttgacgtgcgcaacggatggccctagtatctctctcagaaacacaaacctttacttacaaggtagatcgaaacatgaataccaatgcaaaccccgcgcaaacccttactcccgccgacgctttggaagcggtggaacttctgatgatcctgggaatcgaggcgtaccaatccggtgcatggttgaatgaaagtgattcaactgttcaggttactgacagcgctattgcgttgtggagcagcactcttaaccgctacaagctgctggacctggcacggacgtttgctgaagaagccagcttgttagaacttcaaatcaaagcccgggaggtttgctaatgatcagtctcgttctcactctctgcactgccctggcatgtgatgattatgtgatcgctcaagacagcgatgctgacatcatcaatcataccctgtacgttgaatcagaagagttaggcgatgcctgggtggcccctaacgccaatgatcgtattggccgctacctggcacggttcaacatctccactcccccggctatggtagtggactacgactacactgtggagggcaactgagatgcattggaacattctcgacgatgtacgcgccagcctggcaatggttttcctgttcgaagcggtccatgatgtggctgcctggaccctgctaggccataagcatggctttgctattgaagatgtggctgccctgtccgccgagttctacctgcctttgacggaagtattccaggccttggaagaggcatcaggcaacgtcgaggatgtgagggaaaccttgcaacaggccgcagcaagtcgattagtcgatgactccctggactactacagccgataacaccagccccgctcatgcggggcttttgtttgcctgaaataaagtgttgacactataggcccttcctgtagaatggccgccatacacaaggaaaatgttccacaacatcatctggagataatcatgcgttcgatcaaatccctcgcacgagaagcctacaaaaaccgctatgcgtttgcacgtgtaaccgttgcccgtgatggaaatatgctcgggcattgggctgaggagggttttgacccggtgaagctggggaacatccacgattgttccaccacggtgaatccgagaaagactggcgtttgcttccgaaaccgtgactttctggtattcactttcgggatggaggtccttaaataaccgctcgcaaatctcctttaccagcccggctgtgccgggcttcacagtaaaaacacaggcagagccgaatccccggggcttgacaccagcgatagccccgatagaatagccaccaagcaagacaaaacctgacccggagaaagcaaaatgactggtagcaaccctaacatcgacccgaacactgtggccctgttcactgagatacgtttctacatggcgcgcgccttctttgcgtgtgcttttgcagatcaagctgaagacgccggacaacccttgcaaggtgagattctcgaccaattgccgcagggttggggcgcggattgggcacccttccatgcggcggacactcttattgcacaactggtcacaggcgtgaaggctgggtaccgttctgaaaaagttcagaaagccacccctgtagagatcatcggtgccctgttcaaggcttgcaagagtcgtcatggtgggcgcgcctatgaccgtgaagcgaccgccgagaacttcgggcattacctggcaatgggcgccatgggaacgggggtaggtatggagtgcttcggcccggacgtggcaaagtatttcgaagggctgccctatgtagagttcggctcgcacagcctgagcaaagattatttctgaggagaacactgtggcaactcacaaggcaattcgtgacatcctgtctgctgcaaccgccctggcatttgccgaggttgaacgcctggcgcgggaagtgttccgggaagaccccaactgtatgaatttctgcatggctatgggtagtgcatccttctaccgggagtggatagattgtaacgatccggacggggattggcccatgaacgagtacctgagtgccagggaagtttatgaaatgtcaggcagccaggccgccaaacacctcgacagccttctgacagagttcggggaggcgcttcgtctaactggccaccctctgaagttgacccggatgactgaagacagtatccttcgacaaacggactggtaaccacctacatcgggagtttccctcaatgaagcaagtgtcccccaaattcatcattcacgattcgcacctctaccgtgctgccatcctgcccaaggtggaaaaggactctttgggcaactggtacactgcccgatatgtctggactaaggcagggattcctcttgccaggttgatcgcgggagaagatcaaaaccccctggaaagcttcctgctggcagagggcgctgttatggaccttggccaggccgaggagacgactgtggagcctgctactccctggattgtctttgtaggtgatgatccggtagcagcctgcactaccaatgccagggcgcatctccacatcgcggagcaatggctaaacggaaactctaccgccaaggtgatgcattgggatgaagtcaatccggatgtgctggcgcctattctgcgtaaactggctaatcgcggcatctacctggcgacggacggtcagaacatcgtgaccgtataaagttgacaagacccttttgggtttgtaagatgcgtgtcaaagggaaggtataaagccttcccgcttcaggaaggtgaacaggaatgaacatcattgaccggacccaaggccacgagagtcccaatcactgctatatcgtcactggcagcattgggccggagttcgaaccccttcttttcacgtctaagagtcttgctgttcaatacgccaagcaaatcatcaagcacggaaaagcgcacgacgttttcccaccctttacgcctgttatcgagacccgtcacaaggcggatatgcaccggttcaccgtccacgacaaaatccctgaataaaagcttgacttccctcccgcttcccgtagaataggcttcaaagggcaagggccctctttcataaaggtgacacaaatgaaaaatatcgaactgaacatcggtggcaaagacttcactttcaaggtggaggtggtgagagatgatgagcatggggcgccttgggaagagcaagatgggcatggccctgtgagcgattggacgtgtcgagataagcgccctggcgagttagtcttgaacagtgacggagccaggaagcgtttctatgacttctccgaggcctgccggattgccctccgtgatggttgggattcttatcctcacaacctctttggcgagcaatccaaacgccagcaagctgcaaaggccgcccgtgccgacttcgaaaatcttcgtgcatggtgccaggatgaatggtattgggtcggcgttattgtcaccctgctggacgaagaggggaataaaacggacatcatcgactctttgtggggaatggccagtaacgacgaagacggcatatcccatgaggctggaatcctcgccgatgacctggcaagaggctatggcgtccgctggggcgagacagcaaaaactacttacgaattcttctaaaatcgcttgacagcttaggccattcgcgtagaatggcccccaagcaagacaaaccaccaacaggcaaacccaaggaactaaatcatgactactgaaaaccttacctctcaagagatcgaaacttctgttgacgaattcctgaagtcaatcgacgttaccctggccaccgtgcatcgcggcgagcgcaaggagggggattgggtgcatgacctgtggagtgtaagcttcatccatgagcatggcgttctcgatactgaattccgcactggcatcgggcaccgcaaatccacgattcccatgcctgttgacatccgccgtctggctccgaacatcctggcacgggtggagtgggaaaaacgtcacatcaagcctgtagctcctaaggccgcctgtatcctgtccagtttggttcgagattgtgatgtcggtggttccaccttcgaggagttctgcggcgacttcggttatgacaaagatagccggaaagccctggacacttacatggcatgtcaagagattacatccaagcttcgccgattcttctctcaggaagaggtcgaaaccatccgtagtctggtagagcattactgatgcttcgcgtgtgctacaagtgtctacatgttgggtatcctgttagaaccctaagccggaaaaccaaggtctggtacctaggctgccccctctgccgttctggagtcttcttttcctgaacccaagcccccaatccgggggctttctttttcctaaagggcttgacctggccccctcttcctgtagaatgcgcatcaaagggaagcacaacgctccccagacaggagaccatacccatgagccaggtcaagattcaagagtacattatcgcagaggtcaaggttaaccattgtgcccacctgcgcaagggccagaccatccaagcccgcgatgctagtagcagtgaaaagtggattgcattcatggtggaacgtgggtatagtgcctctgaagccgctatcctattcaaagatgcacatgatgtggcaatgctcgaactggcagcctaacactcgaccttaataggagttaccaatgtctaatgtgaccgtttggaccgaagaatttgaaaaagcggcagcggctgagggctggcttatctctagtacgttctctgaatcaagcccctacgaagtgcaggcgatagataacccggaagcctacagcatggataagggggtcccctgccctcctcgtttgtcgggtgaccgtgccgcatgggcgttgttcctctctggcaaagaaccccatcacagtgcggcccgcagcttcatatcccagcactcccctgtagaatggaggttgatactggaaagcgtctgcaaagactgtcaagggctgggccggggaggccctaacaccacggacggaggggagcacgacgattgctgttcctgctctggcacaggtagctccattctctgaaaaacatcttgacgggggtccctggcttcggcataatgacccccgtcaagcaaacaaaccccggagattcccatgaacaccttcgcatacgcccactacgtcgcccgcatggacaaggcctcgggttcgagccttccctactccaccctgttccgcattgcccttcgtaacgcctaccgcaagcctggcgtccgccaatatgattacactgccctctccgaggatgtcaaaggccgcgaactggcccaaaagcgcacccgtgctgaaaaggctgtcgtgatggctgcggtaatgcgagggattcgcatgggcttcaccgtgagcgtgaaagacggcagcgatggcgaatgggtggttcgtcagtctaccgatgtcaaggaaatttccgacagcctgcaatccacctgtgacgatgttatccgattccgcaaagggtctggccctgagaacgttgtcggctccctgtgggcaatctacggcaacagcgctggcgaagtgatcgcggattggtcggacaatgacaccatggctatggtgatggctcccgcagaacgcaagatggaaaaatacgctgagatggggatttaatgctttacggggcccggcaagggccccataatgcacccatgccaaacaacagccctggagggcaagacgatggacatcaaagcgcgcaaagcaaaggccgcacagatgatcagtgctgctggatggtctgttgaacgcatcgacttccgccgcaacgtcatccgcatcggcaacgccggtaaaaccgccttcgtaacactgtggcgcggcatgactgacgaaatgctggcatcacaaatcgacttgaccattcgcacctcctaacccccgtcccggttcgccgggacatcgctttgaaggataaaacaatgtctgagcaagagaaagatgaactggccatggtagtccatcagcgggatatgctctttgcggcattagattccctgatgcgcgatacagggcttgtaaccctcatgcgccctgatcaggttgtaaggaacctctgcgcccttgcagaatacaagtgtccatcccagggacgccagataggaggcgaaaaatgaagagcaagtatgcaaaaaacatcgctgcggaatataacctttcctgccgagttcgccggattacttttgaaagcgcccggcgccaccctgacagtcgcattgtgaagctcgcagcatcctacgcctgtgctgcctatggccgtccttacaaggactgtatcggtgcctacaaggccgccaagcggcgagagaaggcaatgcgaaaccccgccacatggaagctcaaccgggaagctaagcgggccgtgcagtggctacaagctgccatgaacaaacgcaaataaggctgttgacagcctaggccattcctgtagaatggccatcaagcaaggggataagccccaagcactaggaaggaagacgacaatggtcactatcgctctgaatcacaaaaacatcctcgacaatgcttgggcattctatgcagccgacgtgatggtccgtatcgacgccatgcaggccgaggaagagcgccagatgcgtgagtgcatgggtaaccgagacaactatgacatctcggaaattcagaaggttgtggcctacaacgaaagccggggttggacccgtcgtgccaaaatcgcccgcgcaatcctggccgagcgcctggcagaacccctgattcactcggtagacatcgcctttgcagtggaggccgatatggaagagattcgccgagtagaggtccacaattccaaggctccgaccatgcggcagttgatcgaactgagtgacaagtggatagccgaaggccgagtcgatttgcatgcgcagactgtggagcttatcgatgggtgggctgatgcgatgttgacagaaaaagcttgactcctcttctccctgggggcattatgtctccaacgaaacggaacagcccccaagggagaaaaccgatgaacctgcaagccattgtcaacgccctgttcgaagctggcaaagagttcaaagcctgcaaacgtaacgccagcggctcgatcaacggcaacagcaagcaagctgtgaaaaagcgccttgtggccaagctgatcgaagctggtgagaatcgcagcgacgcatgggccatggctcacgatctgggacgtaactacaactgatcccataggcccaccttgaggaggtaggaggtgggccatcttttaggctaaccctagagagggaaaggcaatgaagaacgttcaaatctgttgttcgaagtgtggagcaatcaacggcggtaagagcaaacacaatgttgtagtggctctgggtaagaagtggtgcgggcactgtgggtctaatctcgcaatcaaggaaagatcatgaacgccaccctggcacgtcttcagaacgaacgctgtgcaactcttcgattgatgctgctcccggagcatcgtgggtacaagttcactggccacccctgggccgagcgaattcgcaatctccacgatgaagcccggtgcatccgcagccatcacaactaacccccttcccagcccggctgtgccgggctttctctcataggaggaaccatgaaagttcagatcggtcagcataccctggaagtcgtagctcccgcccataatgtccccaagagcgacgggtgttgcagtgtgcttttgaacgggacactcctctacgttggtttcaaccctcgtgacgcttgggggctgttcgaagacctggagaaagccctactcagcgtcgaagctctgtcggtagagtctgaggaggccttgcatgactggtaacgtcctggggcagtccccattcaccccctatgcctcagtgccaggccattggtctctcctctctgtcaagaattctgtaacattcactaggtcacgtcgtgacccattgtgtaacagtcttcagactgtcattcgggcaggggcatttgcccccttcctgccctcctaaactggctggcttcgtcgaagccttcccatgccaccagcccaattatgtaacatcctggccatggtcatggcccattgtgtaacggcattgcatgccaggatcaccagacagtcccagctaggccaattgtgtaaccattccccatcccagcagcagaatatccccagccagggaacctatgaccatccccattgcatcctaggtgctcagcccctggaatacgtcgattgtgtaacccatgccaacccatgccctagtagacctcttcgaggcgagctaatgccggcgtctctctaccctcacgggaagagttccccctttattatggcgaccgaatagagaatgcccgattcatgcggcctgtaggccattacaatggccagcccggggaaggattgcattacacaataggcttaccctcacccctgaattgacaggcctcttcgaggctagccaggctcagataggcagcctgagttacacaattcaccctcacatattgccccaccccccatgccacacccctgacattcaaccccatgccccagcttcaacagatacatttgcttcgacgaagcctggatatttccagatcatgacggcgcctcatggccaccctcgggccttgt

SEQ ID NO: 16 - DNA, 88859 bp, Nankokurvius EPa17
  source 1..88859: mol_type = genomic DNA; note = EPa17
actgttcggttttgttgtctcggtgggttttatacgggtcatgatgagttgcttgaccatcctacctgaatgctcttcgaattattggtgctatgtctggtgattatagggtttcgtaaaagcctgtttgaatgtacgcgaagggtccagttgataaggcttggacacggggagggggcacttgcccactccctccccgataggccccctgggggcgcgcatacggccttttcaaggcctttcctatactagggtactgcctaagctaaactggcttctacgaagcctataggccctgttaacatggccataattcccctgttatcgtgacggtccgtaggaccctccccagggtcattattatggcgaccgaatagagaatctatgacctgaggttaggggtccagggtcgccgctcggcgaatggttccccttcaacccaggtgagtacaaacaagctatccactccaaaccctacccctactaaccatcctggctctagctctatgacggcattccctacgtcgaaccactcgaattcaaacataggtcctggcactgaggcatagggggtgaatggggactgccccaggacgttaccagtcatgcaaggcctcctcagactctaccgacagagcttcgacgctgagtagggctttctccaggtcttcgaacagcccccaagcgtcacgagggttgaaaccaacgtagaggagtgtcccgttcaaaagcacactgcaacacccgtcgctcttggggacattatgggcgggagctacgacttccagggtatgctgaccgatctgaactttcatggttcctcctatgagagaaagcccggcacagccgggctgggaagggggttagttgtgatggctgcggatgcaccgggcttcatcgtggagattgcgaattcgctcggcccaggggtggccagtgaacttgtacccacgatgctccgggagcagcatcaatcgaagagttgcacagcgttcgttctgaagacgtgccagggtggcgttcatgatctttccttgattgcgagattagacccacagtgcccgcaccacttcttacccagagccactacaacattgtgtttgctcttaccgccgttgattgctccacacttcgaacaacagatttgaacgttcttcattgcctttccctctctagggttagcctaaaagatggcccacctcctacctcctcaaggtgggcctatgggatcagttgtagttacgtcccagatcgtgagccatggcccatgcgtcgctgcgattctcaccagcttcgatcagcttggccacaaggcgctttttcacagcttgcttgctgttgccgttgatcgagccgctggcgttacgtttgcaggctttgaactctttgccagcttcgaacagggcgttgacaatggcttgcaggttcatcggttttctcccttgggggctgttccgtttcgttggagacataatgcccccagggagaagaggagtcaagctttttctgtcaacatcgcatcagcccacccatcgataagctccacagtctgcgcatgcaaatcgactcggccttcggctatccacttgtcactcagttcgatcaactgccgcatggtcggagccttggaattgtggacctctactcggcgaatctcttccatatcggcctccactgcaaaggcgatgtctaccgagtgaatcaggggttctgccaggcgctcggccaggattgcgcgggcgattttggcacgacgggtccaaccccggctttcgttgtaggccacaaccttctgaatttccgagatgtcatagttgtctcggttacccatgcactcacgcatctggcgctcttcctcggcctgcatggcgtcgatacggaccatcacgtcggctgcatagaatgcccaagcattgtcgaggatgtttttgtgattcagagcgatagtgaccattgtcgtcttccttcctagtgcttggggcttatccccttgcttgatggccattctacaggaatggcctaggctgtcaacagccttatttgcgtttgttcatggcagcttgtagccactgcacggcccgcttagcttcccggttgagcttccatgtggcggggtttcgcattgccttctctcgccgcttggcggccttgtaggcaccgatacagtccttgtaaggacggccataggcagcacaggcgtaggatgctgcgagcttcacaatgcgactgtcagggtggcgccgggcgctttcaaaagtaatccggcgaactcggcaggaaaggttatattccgcagcgatgttttttgcatacttgctcttcatttttcgcctcctatctggcgtccctgggatggacacttgtattctgcaagggcgcagaggttccttacaacctgatcagggcgcatgagggttacaagccctgtatcgcgcatcagggaatctaatgccgcaaagagcatatcccgctgatggactaccatggccagttcatctttctcttgctcagacattgttttatccttcaaagcgatgtcccggcgaaccgggacgggggttaggaggtgcgaatggtcaagtcgatttgtgatgccagcatttcgtcagtcatgccgcgccacagtgttacgaaggcggttttaccggcgttgccgatgcggatgacgttgcggcggaagtcgatgcgttcaacagaccatccagcagcactgatcatctgtgcggcctttgctttgcgcgctttgatgtccatcgtcttgccctccagggctgttgtttggcatgggtgcattatggggcccttgccgggccccgtaaagcattaaatccccatctcagcgtatttttccatcttgcgttctgcgggagccatcaccatagccatggtgtcattgtccgaccaatccgcgatcacttcgccagcgctgttgccgtagattgcccacagggagccgacaacgttctcagggccagaccctttgcggaatcggataacatcgtcacaggtggattgcaggctgtcggaaatttccttgacatcggtagactgacgaaccacccattcgccatcgctgccgtctttcacgctcacggtgaagcccatgcgaatccctcgcattaccgcagccatcacgacagccttttcagcacgggtgcgcttttgggccagttcgcggcctttgacatcctcggagagggcagtgtaatcatattggcggacgccaggcttgcggtaggcgttacgaagggcaatgcggaacagggtggagtagggaaggctcgaacccgaggccttgtccatgcgggcgacgtagtgggcgtatgcgaaggtgttcatgggaatctccggggtttgtttgcttgacgggggtcattatgccgaagccagggacccccgtcaagatgtttttcagagaatggagctacctgtgccagagcaggaacagcaatcgtcgtgctcccctccgtccgtggtgttagggcctccccggcccagcccttgacagtctttgcagacgctttccagtatcaacctccattctacaggggagtgctgggatatgaagctgcgggccgcactgtgatggggttctttgccagagaggaacaacgcccatgcggcacggtcacccgacaaacgaggagggcaggggacccccttatccatgctgtaggcttccgggttatctatcgcctgcacttcgtaggggcttgattcagagaacgtactagagataagccagccctcagccgctgccgctttttcaaattcttcggtccaaacggtcacattagacattggtaactcctattaaggtcgagtgttaggctgccagttcgagcattgccacatcatgtgcatctttgaataggatagcggcttcagaggcactatacccacgttccaccatgaatgcaatccacttttcactgctactagcatcgcgggcttggatggtctggcccttgcgcaggtgggcacaatggttaaccttgacctctgcgataatgtactcttgaatcttgacctggctcatgggtatggtctcctgtctggggagcgttgtgcttccctttgatgcgcattctacaggaagagggggccaggtcaagccctttaggaaaaagaaagcccccggattgggggcttgggttcaggaaaagaagactccagaacggcagagggggcagcctaggtaccagaccttggttttccggcttagggttctaacaggatacccaacatgtagacacttgtagcacacgcgaagcatcagtaatgctctaccagactacggatggtttcgacctcttcctgagagaagaatcggcgaagcttggatgtaatctcttgacatgccatgtaagtgtccagggctttccggctatctttgtcataaccgaagtcgccgcagaactcctcgaaggtggaaccaccgacatcacaatctcgaaccaaactggacaggatacaggcggccttaggagctacaggcttgatgtgacgtttttcccactccacccgtgccaggatgttcggagccagacggcggatgtcaacaggcatgggaatcgtggatttgcggtgcccgatgccagtgcggaattcagtatcgagaacgccatgctcatggatgaagcttacactccacaggtcatgcacccaatccccctccttgcgctcgccgcgatgcacggtggccagggtaacgtcgattgacttcaggaattcgtcaacagaagtttcgatctcttgagaggtaaggttttcagtagtcatgatttagttccttgggtttgcctgttggtggtttgtcttgcttgggggccattctacgcgaatggcctaagctgtcaagcgattttagaagaattcgtaagtagtttttgctgtctcgccccagcggacgccatagcctcttgccaggtcatcggcgaggattccagcctcatgggatatgccgtcttcgtcgttactggccattccccacaaagagtcgatgatgtccgttttattcccctcttcgtccagcagggtgacaataacgccgacccaataccattcatcctggcaccatgcacgaagattttcgaagtcggcacgggcggcctttgcagcttgctggcgtttggattgctcgccaaagaggttgtgaggataagaatcccaaccatcacggagggcaatccggcaggcctcggagaagtcatagaaacgcttcctggctccgtcactgttcaagactaactcgccagggcgcttatctcgacacgtccaatcgctcacagggccatgcccatcttgctcttcccaaggcgccccatgctcatcatctctcaccacctccaccttgaaagtgaagtctttgccaccgatgttcagttcgatatttttcatttgtgtcacctttatgaaagagggcccttgccctttgaagcctattctacgggaagcgggagggaagtcaagcttttattcagggattttgtcgtggacggtgaaccggtgcatatccgccttgtgacgggtctcgataacaggcgtaaagggtgggaaaacgtcgtgcgcttttccgtgcttgatgatttgcttggcgtattgaacagcaagactcttagacgtgaaaagaaggggttcgaactccggcccaatgctgccagtgacgatatagcagtgattgggactctcgtggccttgggtccggtcaatgatgttcattcctgttcaccttcctgaagcgggaaggctttataccttccctttgacacgcatcttacaaacccaaaagggtcttgtcaactttatacggtcacgatgttctgaccgtccgtcgccaggtagatgccgcgattagccagtttacgcagaataggcgccagcacatccggattgacttcatcccaatgcatcaccttggcggtagagtttccgtttagccattgctccgcgatgtggagatgcgccctggcattggtagtgcaggctgctaccggatcatcacctacaaagacaatccagggagtagcaggctccacagtcgtctcctcggcctggccaaggtccataacagcgccctctgccagcaggaagctttccagggggttttgatcttctcccgcgatcaacctggcaagaggaatccctgccttagtccagacatatcgggcagtgtaccagttgcccaaagagtccttttccaccttgggcaggatggcagcacggtagaggtgcgaatcgtgaatgatgaatttgggggacacttgcttcattgagggaaactcccgatgtaggtggttaccagtccgtttgtcgaaggatactgtcttcagtcatccgggtcaacttcagagggtggccagttagacgaagcgcctccccgaactctgtcagaaggctgtcgaggtgtttggcggcctggctgcctgacatttcataaacttccctggcactcaggtactcgttcatgggccaatccccgtccggatcgttacaatctatccactcccggtagaaggatgcactacccatagccatgcagaaattcatacagttggggtcttcccggaacacttcccgcgccaggcgttcaacctcggcaaatgccagggcggttgcagcagacaggatgtcacgaattgccttgtgagttgccacagtgttctcctcagaaataatctttgctcaggctgtgcgagccgaactctacatagggcagcccttcgaaatactttgccacgtccgggccgaagcactccatacctacccccgttcccatggcgcccattgccaggtaatgcccgaagttctcggcggtcgcttcacggtcataggcgcgcccaccatgacgactcttgcaagccttgaacagggcaccgatgatctctacaggggtggctttctgaactttttcagaacggtacccagccttcacgcctgtgaccagttgtgcaataagagtgtccgccgcatggaagggtgcccaatccgcgccccaaccctgcggcaattggtcgagaatctcaccttgcaagggttgtccggcgtcttcagcttgatctgcaaaagcacacgcaaagaaggcgcgcgccatgtagaaacgtatctcagtgaacagggccacagtgttcgggtcgatgttagggttgctaccagtcattttgctttctccgggtcaggttttgtcttgcttggtggctattctatcggggctatcgctggtgtcaagccccggggattcggctctgcctgtgtttttactgtgaagcccggcacagccgggctggtaaaggagatttgcgagcggttatttaaggacctccatcccgaaagtgaataccagaaagtcacggtttcggaagcaaacgccagtctttctcggattcaccgtggtggaacaatcgtggatgttccccagcttcaccgggtcaaaaccctcctcagcccaatgcccgagcatatttccatcacgggcaacggttacacgtgcaaacgcatagcggtttttgtaggcttctcgtgcgagggatttgatcgaacgcatgattatctccagatgatgttgtggaacattttccttgtgtatggcggccattctacaggaagggcctatagtgtcaacactttatttcaggcaaacaaaagccccgcatgagcggggctggtgttatcggctgtagtagtccagggagtcatcgactaatcgacttgctgcggcctgttgcaaggtttccctcacatcctcgacgttgcctgatgcctcttccaaggcctggaatacttccgtcaaaggcaggtagaactcggcggacagggcagccacatcttcaatagcaaagccatgcttatggcctagcagggtccaggcagccacatcatggaccgcttcgaacaggaaaaccattgccaggctggcgcgtacatcgtcgagaatgttccaatgcatctcagttgccctccacagtgtagtcgtagtccactaccatagccgggggagtggagatgttgaaccgtgccaggtagcggccaatacgatcattggcgttaggggccacccaggcatcgcctaactcttctgattcaacgtacagggtatgattgatgatgtcagcatcgctgtcttgagcgatcacataatcatcacatgccagggcagtgcagagagtgagaacgagactgatcattagcaaacctcccgggctttgatttgaagttctaacaagctggcttcttcagcaaacgtccgtgccaggtccagcagcttgtagcggttaagagtgctgctccacaacgcaatagcgctgtcagtaacctgaacagttgaatcactttcattcaaccatgcaccggattggtacgcctcgattcccaggatcatcagaagttccaccgcttccaaagcgtcggcgggagtaagggtttgcgcggggtttgcattggtattcatgtttcgatctaccttgtaagtaaaggtttgtgtttctgagagagatactagggccatccgttgcgcacgtcaagccctttttgatcttttatttgaacaaccacgcggcaaagagtaacgccaccagtcctagcaacagcagtgccccgatgtccacatgctgcgcaggctggatactggcatcggccaaagccttgatagtgtcgtggctgtccccctcaggctctgcgccatacttggattcgaaggccttccacaaggcttgccggcgctcttccaggctattggccagttggtcaaaagtggcaggctctagggtgtcttgcttgcgccgtaactcctcgcaatctcggtccagggcatttaacttccgctggatagggcaagcccggtctatcaccgaaaggacaggcttgcgcggggtgtcttcttcatctcccccagatacccaggtcggaatggctcttaaacgtctcggcacggaatcactccccactctttaccggtccggaatagtttaactttggtccctccacgagcgcagcacagggccagggcgaaacagtattctacgtgtccggggtagcattcaatgaccatgattaaacctcaaatgtggggttgcagggtaacatctagagcatctttcgtaaaccctggagaatgtccagggtttagggaaggcgccccaggcgccaggttagtccttgctgacccactggttacgcttgttctttcgcaggttgcgaagctcacggctcgccttgatggcttctttacgttcggaacgggcgccggatttgtcagtacgcatgatatatctcctcagagtgaaaggttaggctgcgaactcatcgcaacgatacacattgatcgggcggccagctttccccgcttccctctgctgctggcgaatggtcgggatttgcacgccttgcagtttccagtgcttgagggcgttgttcacatcgctgggggtggccaggtggtggacgtaggggatgatatcgtacaccgtgaactcctcgccgagccgagctttgatccactcccggacgatgatccgaacggtaggggtgtcgggcttgagcgccttgctggtggactctaccactaccttgacgggagcgttattgacagcctcttgcatggcagccatgacgcccggcttgtcccagcggcgttgggaattcttgaaacgttgtgcaatctcttcgaacttgaccatgttgtgttaccctcagtgcgttggtgttggggccagtttatgagtttcctggccccttgtcaacccttattcttcctcttcttcaaccgcttcccaatcggcggggtcgatgaagaattcgatacaatcgtcgtcttcgtctcgcagcgcctcctccaactcctcggtcaattgagactcatactccccgcatgcgcaacggaaagctatggggtccatttttagcagcacttggccggcagagaaagagatgttggctatcttaaccccttcgtggatggaatccaactcttccacgaactcctcttcggacaagtccacctcgcccagggtgacatcgtagtttcggaatgttgccacattctcggcattccagggagaatctacgcccatatctttgaaagcttgaacagcttccttgatcatgccttgacgtgccagttctttagggtcgagagtggtcatgctgatatccttttaggaggagggggaccgtccccctctgtgatgcctattctacagacacgagatgccgtgtcaacactttatttcaggattcgggtttcttcgaacaacttcaccgtggccaggcgctgtttttccaggcgggcagccagtgcggttaggctgtcaccgtctttgccatagacagacgagttcagcatcactactgtgaactgcgggaagttttcggactggtacaggcgatccatggtgattcggaaagtgacatccttattcagcacgcgatcttcgatagtgccacctgctgcctcctccagggcttgctgaacactgcgaccgttaatgtgcgtactggccatcactttacccttaacgaccattttgacttcgcccgccaagcggtccccgtacacctggcccagctcgatagcacctgtagcggtatggatgatgttcattttgggaacgtagttgtctgccaggtccttggcatgcgccatctccaggctgaccgcttgagctttcagtgcgggagggagggcaacggccttgccgatcatggcgccagcagccagagacaggggagtggtcagaacgaaagccaggacggttttttgaacagtgttcatcgtgttatctcctacggagtggatttaggcaagctgcccccggcgtccaggggcaaccctaaaagcactctgctgttacttgacgtagacaggcaccgtattgccagccttgccaaaggcgaggtattcgcagcccagcactcggacgctgggggagatattcagcttgactccccagcggcgggaagcttccgcgccgttatcggttacctggcgaggcaaggaagagcccttcacgaaagcacgggctgcggtacgggaggagaaatgaatttgcattgtgtgttacctctgtcggggttgtgggtgctattgtctgactggggggaatcaggttgtcaagcgtttatttcgtcaaccggcacatagaattcgatcccacgccaagcccctcccaccttggccatatcaccttgtatcttactcactcggccagtccatatttctcccgtgccggtatgcttgaggaacttaccacctaccaactgttcgggcgtgtattggcacgttccgtcgagctttttccgaaggtcgccccggatggctacgatatcccctattttgacagacatcttgtctctcctcaggcagttcggaagggttcgtccggcttgacgtcgaagataacgccgacgccgtgaacctgaccattacgatagagagtgtgccacctggccacgcccttcgagtgcttcaccagataggtgcgacgacgcaggttcgcatctccatcttcccactgattatcccgctcaatggggaagtaccgattcaggtctacggccacgcggtcatactcgccacggttataggcagcgtacaggtcacgttgattgcagagagctttttgcatggttaccttcctacaggttgtttgccttgcttgagggtcattctacggtggaacggttagaagtcaaccccctttttaagaaatttctctggcaacgccaggtagaggaacgcgcaagcgtagcaaggaacatgccaggtcggcgatgaaaaatcctggcccaaggcttgacactccaggctcatcctggcattctgtaggcgtgcgggaaagcaggccggaggggccgggcgccggagacaaacaccgcccctgcccgcttttcaaggttggcatggtgattgcatgtgaaaggtagtttcggcgggagagggatagatagggagctacttaccgggggagtgacgtgctacagcggggagttgacgtgctacaagaggccgaggggtcgggccacctggtgagggaaacttgacagttcttttgatacctgtctctgtaaaaatctgtcgagtaccttgggcgctcggtgaaaatctgtcgagtaccttacgcccggctgtgaaaatctgtcaggtaccttgttcaagacgaacggaatcgatcttgacgctcttgaaagtggaagcccacagctcctgagcagcctgccctagcgcctcccaggccttgagtgtccggcaggaagggcagaggccttctacgatatcccgggcaggggtggggcagtcgcacttcttacaacgaatctcaggaccagatgtacgcatgatagtgatatgcacttggaagctcctctgatgggcctaggagacgatttctcccctaacctaggccgtgagtcagggggccggcttaaaatgtgatagcgaggctgggaggccccttcaaatatctagctcgaaatagggggccacccaaatatctagagcaaatatccccagcccctcaaatatctacacccccgaggacatgatggtcacaccttcaggaatctcacccgcccgtaccaggtcggttgcccacccctcgtactggtaagggatttcgacaataacttcgaactgcttcttcagcagggcacagtcgatggccagggcatttgcccatccctcacccacacccacggacctcaaccctgtcagcccgtgatacctgtctttgagaataaacacatctaccacagaccgggtaaagccattcatgttgactagcaaacctgctcgacggtaggcgatgttcatccataccctgtcggctcgctgtaccagttcccggtgatcacttagaagccccggcccacggatcgcaataccgttatgatcaagcccctgggtagggccgaacacgatagaactgacaacaccttgcagggtatggtcttcacatcgtagggctgctgccaactggtctttcagaaggagagccttgttcatacgtggtacccccgattgcgaagaattcctttagcttccgaccagaagcccttaacactagattgggggcgctcaacaaagtccaggccttgagtgttcaggaaatccaccatagacaacaggaggcttacctttgagaatgacgggcttttagccactgtccagtacatagacggctcatcatggtagaactgcaaagagtccaacagacggcggcgaacaccgatgtctgcgatgaagaacttctcgtcatagagagtctccacacttccatctttacgccgcgcccagtcgttctccagggatggcacgccgccgtggcacttggaagcgaactcccacgactgttggctgagaagatgcccaacagcacagtgatttccctggccatctacatagttgcagcgcccgtcgatgaggcatcgacccttctgagtgtacagacggtcagcgaggtgaatcaggatgtctgcgatggtttgagcagtgttcataaatcctccaaaggtggttgagggctcagtgtataagagccctccggtgttgtcaagagagtttcggattaaaccctaaccaagacggcatccaatcactgccatagcgggtccaggcatactccatctcctccatcaaatccagagctgcctcttcatcggcaacctgtagagtagcagtgcaaccgttgcagtcgttgatcaactgaatctcgtacatcagagaggaccctccacattaaacacaaagtgatcgaacacatcgaaccgtgggcatccatcttcttcgggcaggatatccaggggaaacaggtgatcccagccctcatcgtccaccacgtagaaggaaccatccttgtacaggccgtctgtgataacatcataggttttacccaacgtgaggtgggctaccatagggtcttcatccttcgggctggaaccctccatgtagagggtcatgacgtaggtcgccttcagctttcgcccctcttggaggagtttcttgacagcggcgcggtgttggctatacaggtcttgcatggaatcctcctaatcgatgcccagggagctggccatcagtgaaatcagtttgcccagttggcggtgagtctcgatgagggtgccctcttcgtcccggcactcccaatacccatcttcgtgctttttgaaagagtacccgcaggctaccatctcttcctggcgtttagctgcccaagtgttcatagctttcgttccatactgaggggcggttggaggttatctccaggagcctcattgcggagacaaggttactattctccacgtcagaaagcaacctcatcagacgattttttgtcagctcctggcggacatcttttggaggtaccggacgttgaagcaacatctcttccacttcctcctggtgacgtttcttcatcctctgggcctgaacaatccagtcaagctcgtccatggcgccggagcagatgcaggtgtacccctcgacggagtagtcgtaccctgcaaatcgatcccctctgttctggacaggtagagcagcacgaccacagaaggagcaggagtgggccccgcgctgttgaagggtggaagtaggttgaaggtcggcgtggcgggagttccaactgtaggtgtagccgtacttatccgcacccttgacgctcttccctacgaaaaccagagagaagaagcgttcagcccgttcgtcgcaatgggcggggaatttcccctctgcatgaaaatcgtagttttgatcgttcatctttacctcccggttgaaatagggccagtttacccggccccgtacatcctgtcaacagttttggccgttcttatccagccaaaagtcatagccttcccgggtgttactccacacaaaggcgctcttcaaacccacgaacataccttctcccgtctgcaaccactccgccatgtcatggtcagtccgctccctgaccagccggaggtcagccttcattgccagacggcgatgattgcccgtcagcccctgccggtcgtagtggttgttgagctgagcacgtatggtcttgttcactttacacctcctttccagccagttcgggaatcttgcacacagccgagtgacgccgagaggtttgagcaccccaggcagtcggatgtttcaggattaccgtcttcgcccggacagcttccacagtggtgactaccatctcagtagccttccctgcggtgctggcgatagccacctggtcgcccacatgcagtcggcggcctgccacgtcaaacgcttcgatttctttactcatggaatccaactcctcctttcgttgtaaatgaggtgaacttgtctaggaacccttcccggacccacacctcccgagcctccataaggtccttcatggcctcttgctggcaagggatgtcggtgtaagcccgggaagctccccggtctgcctggatacgataccagattgtactcccgtctgaccaccagttcaaggaaaatgtgatcttctcccctttagggctctctgcctggaaacgtagcagcttagtcgtcatacccttcaatctcctcccatatcaaatcttgcatgcccttgttaatgggcatcttcaacacccggagagcgttggccattttgaaggcggcctgtttccctcccagcaggacatcttcctctttcatctcgtaaatgcaaaggttagcccctagcatacccatctcgttgaaagcacgcaagcctacccactcccgcgcttgctcccaggaactgaagccgaaatagtaagtgagcatctctttttcattcttggcaaggtcttcccacccggggatgtcttcctcggggacgggatgtagctccttctccttatctaaacacatgcaaagatcgatatagagaccggtagcctgccatcgggggtatcctagcccctggaggaccttggattgcaccctgctactcagttcgtcggcatacatacccttgccacacaccgtttcgattctaagaatgaaaagagatgccataaaatcctccaggtacgaaaaagcccccacggctcttcagctcatgggggctatgataggtcaaccggctcggctagtcaacatgaaattgtacttggagtaatccacatcaccgctcagcttggagtggctatagtccgtcaccttcttctcgaagaagttgtcgtgtcgggcggcgttgatcatccactccatccagggcaacgggttctcacccacctggtgctccttgagaagctcgcattcgaagagcctcaggcggcacagatagtcgatgtactcgacagtctgctcgaaggtcaggtcatgctgagggcccttctcgaaagccaggaccagatacttgacctcggcttcccggtagtcttcgatcaggtatcggatttcctggtccaagatcgcattctcttccggggtaaggtccttacgcatggctttcaggacgcggatattcttctccacgtggtcggtctcatccgccaggctccactggttgatgtcgttgaacccgatcagcttgccgcaacgcttcatgttcagcagcacagtgaacgcaccgaacaggcctacaccttcgccggtcagaagttgggccaggatgcaagcggcctggaggggctcggaccagcttgcgtctatacgattctctcccatcacctccagcttgtctcgcatctccttgtaggaggcaaaagctttccaatcgccatcggtgaacccgaactcctcggctgccagggcataagctcgctggtgaaccacctcacgggaggcggcagtaatgagccagtttcgaatctcattgttcttgatgtacgggaggagcttggtgtagccctcgccgactgtccggtccatctcggtgaacatggacagggttttgtccagcagccacttgtggttctcgtggggaacctggttggtcccgagccctgaggtgctgaaatactgctgcttgtcgtctgtcaggtctgcctggtgaacatcccaatgcatatcgatggcatggacccgagctgcctcgactgcccaagggtaaacaaagggacggtaactggtgctttcaacaaatacgctcacaatctctcctttcaaagaaggggcccgaaggcccctttgttttactgcccagtccagatttcatgcggccacatctggccttctggcgggggttgcatcgggttgaggatgatgtctgcctcttccacctcgtgagggatgaacagctcgttcttttcagcctcggcaacgcccatgatgttccactcatagctagcggtaggcgggaacaggaaccagcccgcaatcagcagcttgagttgggaacctccgtgagtggaggaatggtccattgcgtcgatgaggaagtaggtgttgtatggtggaattggcaccacgaacatcatgtcttcgttcatcgtgatcggataactgaagttgacgtacttgtactgcaacgccagacagttttccacggttaacgccatgtgtgctccttacccttggcaggacaggcaagtgtcctcgtccagggagattgtgtatcgcactgggagggcattcagaggctcagcgcccccggtaccaaccttcatgctcttcgccgccttggagcggcagtagtagaggctcttcagccccttgtgccacgcatagatgtggatgtccgacatctcttgcagcgtgatgtccgggtgaacgtacaagttgaccgactgagactggcagatgaagggttgacgccctgctgctgcctcaatcaaccacattgggctaatctcccggatcgtcttgaacaccgctttcacctcgtcgctcaaaccttcgatgtgctggcaagagccttcagcatcgttgatcgaacgccaggtttccttggtgtccaggccgactttttccagctctcgccggaggtattcgtttttgatcaggaagctccccgcccggccttgagcgttgaagcagttgcctgcccagggttcagtggacggagacacgttgaccaggctggagctgttggcattcggagcaatcgccagcaagtggctattccgacgcccgcttccctggcagtccggagcctccccacgggagcgtcccagctccaagctggcctgtacggcctgctccttgatttgcttgtaaacctgatagttgagctgctgcatgccgcccataccaccagattcgaacgggatcatacgctgttgtagcagagtatggaagcccatggttcccaagccaattgcacgctccttggaggcggagtgtacggcccggtgcatgctcggaggtgccaggcggatgaagaactccagcacgttgtccaggaaccgaaccatgtctgcgataaacagcggatcgtccttccactcatcgtaggtgcccaggttaacactcgacaggcagcacaccgcagtacgcttgaagctggtgtacagagtgatttcggagcacaggttactctgtcgtacccggtacaacggatgagtgatgcattccggcaggttacggttcaccgtgtccacgaacaacatgaacggctcgcccgtgtccttacgaacctgaagcatctcttcccatagctcacgtgccggaaccttacgtccagtcttaccgtgtttgggatcaacgaactcccaatcctcacccttgatgaccgcctccatgaaggcgtccgggatgttagcaccgttgttcaggttgaagcgcttcagcttcgggtcaccgcctaccgggttccgcatttggaggaacacagggaactcggggtgagccacgtccaagtacatggccatgctgccacgacgagtacgggtctgacggtaagcccggcacatgacatcgtagtccccagcgtgctcaatgacgcccgtagacagctcatccggggccctgatgcctgcgtagacgcctaccccaccaccagccatgctcaactctttcgcttcaccagaggccgttgtgaggcctttacggctgtccgcgatcatcgataggaagcaactgatgggcatcccggtggtatcgatgttttcttgaagccagtcccctgcttcgtcaaactgctcttcggtgaaattgggccactcgatgtccagggcgttggtttgtaccgggcttgcaggcactgcccactgccggctgaaataaccatacatccgctgagcaaaatcgtagtcaccgaagcaatagctcaccgctgctcgtgacagcgtttgttgaggcgatgtctcgtgttccttcttgtagaagccgtccgaggtgagcatcgccaatccttgttccgggatcgtccggtccagggaataatcaatcagaatgccgttatacggctgaacactctcactcattcaggaaatccaccatagcctgtgcagggtttagtcgccgacccatgtggatcagctcgtcacggaggctaccgtccttggcagaggcgatgattgcctcctcgctcggtgcccccttcttgatccagctctcgtccagtcgctcatagccttcgaaacgttcgccggagatatgttgcccacggaggttccggtgttcccggtgaaccacttcgtagggctgtgtggtgtccatgccgttgcggtacagcagggctgccaagaccttggggttacctgcctggtaggcagcgaacgcctctttgaaaccagttaccagccgcaggtccgacacggacagcgaaaactcgaccttaccttgactcacagtttaccccttcttgcaattgttcggaattagttgacgatgctgaatccaacctctcaggccggaggaccagtaacaaccatcacgatcctggtgggtcacacccttctcccagccacctgctatatgcatgggggtggcctggtgctcggtaggactggcgtgaactggctcgctattgatcagcttgtcgaagatcacttcggccttgtcctggctcttgtcagtggcccggtagctggtctgagcacagcagcttgcagaaagcttcaacgcttgctctacagagatgatctccccgttctcatcgaagtattgccggcccatgcccgggatgaactctgttttcacatagggaacgtgccattgaccagggaccagtaattcaggggccaccccggcagtggcctccttcatcattcgagccaggtgctggaactccggctgggcgtcttcgtgatcacggagccagtagaagttctcccactcggtagcggtcactaccgtcttcatcatctggaaaggctcaagcacccggttgacaatctgcttgtgcagtccaaccttgtgcatagccagggccatcccagcggcggccttggcagctttgatccagagatacttggctgccacctgaagaggcttcgacagctccttgtgagcttgcatgccggcctggttagcaccccaatggactggcatagctgggttattccgcacctgctcaatgagcttcttggtggggatagcccggctggaggcacagttcttgaagagagcgtggtgcgtcatcagctcggcgtggatgaaccggggatactccagctcgaaggtggtgattgttaccgggaactgtgatgtacctggataggaaatgcttttggcgatcacgctcgctttcattggttactccttcttcgtttctgctttggcacgggtctgaatcagctcccgttgagagaagaataccatcttctcggcatcatagacagcgttgttgcccttctttttcttacccagggtgcgctcggctgcttttcgccagattgccttgaacacgttcgcttcggcgaaggtcatgtctagtgcctcgataaaatcgttgcactccccgatgtacggttctccgccagaggtgggattacgcacctccacttggtagtagctggaagaacctcccgtgtgttccccctcatcttcggaaggggctacagggtttacccatccagacgggcttccaagggttttgaacatctctgccgcttctttggaagcgacatactcgctggcagtgatcattacagagggtcccagtttcacagcttgactccttcgtccagggaggtggatgccaccttcatcgtttcggcaatcatctgcgtggcagccagcagagtgacatacacagtgatcatcggggtgtcagggtagttcttttccaaccacatcagtaggtcagcccccagctcctgatcgatggacacttccatctcggtggtttcgggcttctctggggcgtcgagcagatcgctcatgatcatgcgtgaattctccttgtagatatgaaagagcccacccgaaggtgggctttgaatcagatgccgactaccaggtgttcccggtccaagacattctgacgagtgcgggagtgcttcccacaactatggcagcggagaacctcgaaggccgacactgcggtgtagtacagtttgcccgttggacgcaagtcgtccgagcagcacacagggcaatggggagtgaccttctgagggatcaacgcagagagcgacgggtgggtattataccacgcacgcagcttcaagtaaacctcctccaggacaatcacgtcgaagacgttgtactccatcatgtggtcccaagcctcggggtctccatccatgactctcgcccacagctcgaaaccgccagtatcaagcttatcgtgctgacacttcaggaaaatcgccagggacttcagagagttgctcgggaacttgaacaccttcttggcaatgtcgcacgtgtcgatgatcttgtacgggctgggaggcaagatatcgtgcttcaccaggtgagcattgatcgtcggcaggtcgaacttgcggccattgtgcgccaccacgaagtctgcctcatccagcaggcctgccaggaccttgagaagctctcggtcattcttcggctcggtgttgtacaggtcgaaatccggaagcttgcactccaggatatcatcgctgcccagccacttggccgagaaggtgagcaaataaccttcttgcaacacctggttctggcccactgtggtcttccagcggctccagtaatagccgatagccggagccgtctcgatgtcgaggatcagcaccttgggcatcggcttgttctcgttgatcttctgagttcgtaggaagtcgctcacagtggacttggccatgcccagctccacggcaatctgacgccaggacttcccggctgctgccagttctagagcggtattgtgccacggtttcatgaaatctccttagtgcgccgtgatgacgtaattggacgggtgaccacaacggaggtggccatagctgttgtcgaactcgcagatggcgtcaaaccactcttccgagtccggctctaattccccggtgatcagggcacacagctcatcgaaccgcctgcactctgcttccgggaccaggtaccagtggcaggaatcatcctgccggaacatgcaccgttgggtcacttgtactcctccttcaggatggcgaagatttgatcccgacgcttagccgctgtggtgccaggctctacccctcgctctttcagccatgccttgacaacattcacgcctttcttgccaatggcgatggcttccttgtcagcctgggcttctccccaggtatggaaaccttgccgctccatgtgagtcttgatttcatggcacggcttacaaagccatgccaggtcatccatacctaccagcaccacaccttcgatgaacctttgcaggtcctcaatagatcgaagactgaactcccctgtccggtgatcgacttccatgtccgctgcacgcttcacctccccacatttggagcactgggcgccttttacggttgggaaccgcttcatgcttctcgggttggtgttcaccatctccacagagttgttcttgatgaactccagcttgaccgggtgcctcatccacatggcgcgacggatacctcctcgcagccaggacaggaatgaagcctcagtcttccaaacctctggaagctcttcccagggtcggcgacgaacactcatctcccaccccactggaacaacagccggttgaacaggcccatgccgtagatagcccccaccttggacagcttcaggggtcctagttggatcacgcagatgacacccgcccgaacgaagtacaggtgggggaaccacccccacaacttgcctttctcggtgaccgtctccatcagccgaactcctcttcgactgcctcctcgggagtcaggccttggtcatagtagtccccgtacaggccttccaggaagtacgcatgggctgacggcaggccgcgactttcgagaaccaggtccaactcttccagccaatctgtaaggcttacttgctgcattctatcactcccattttctccagcgtctgccggacattgattcggtcgttttcccaacgctgcatgtgggcgcagtccacgtacatctgcatgatgtcaatggcgtcctttcgcataacctcgtcggtccagctaacgtactccacttcctccggataccagagcttgtattggtcgtacattgccttccaggcatcccggtcgtcctggcaatccttcaggacagagtagaccttcttctccccaaagggctttggagtgcctccggcctggtaggtggcccactccaggatgtcacgggggttgtagttgtccgtactgtctcccaggagaatctggaagtacagccacatccgaccatgccccttgatatccttacccatctcgacgagctggccaaaccccctgttatccatgatgcccaggccaggcttgttggggttgtagagacgactctccacacccatcgcatccttgtcctgtgtgcaggggatgatccactgagcagcacccttcagctcggcaatacgcccggcgtaccctcgggttgcaagagcatcgtcggcctcgcagcgataagtggtcagtgccccatgctttttgatcaggtacttcttggcgtcgctcaagtgtaccggacggagggaatccccccgggactctttgtagcgtcccgccttctcagtgccgttcggcgctcgcttgttgggaggggtgcggtagcgcttgggaaggtcgatgtcgagtcggaagttgtccgggcccgaaatcagaacctggtagcccgtggcattcacctcagcacacaccccggcaatcatctgcttgagggtgaacaggacgttctcgatgggttccgggtactggacatcccgaatttcgaactgatcctcagtgaacttcccaccgtgctgggtcttcaggaagtctcggaattccgtgcgatggttgaactccttctccctaccgctggggatgtgcttcgctatgatagcacgcccctctgcggcagagcaggccttaaaggcccactcgtcaccgtcgattacggcaattgtatctgccggttgggacattatgcgtcctccgagagttcctcgtaaacctgacgaagctgggagaactcatagtctttctcctcgaagtcgcgcttcgcgtcgtgggctgctgccttgtcgatcagcttgatacggtccttgtccaggccgtgctccttggcatccttcttgagctgcgaacggtcttcggcgttggtcagcttttcacggtgcagggtcaccaggcggtcgaacaggtccttctcggtcatctgaccttcacgtgcgtcgttgtagttttccatgattctctccttcagttctggatgttgatggtgctgggggaaacctgctcagttttccgaggcaggatttggaagtcgaacagcggctgacgagattccgggtcagttgtgctgggaatcatcagcgtgcttttggagccttgagcaataagatgtagctgctctttccaatactggaaatcctctttcatggctaccggaatgtcatggccaaaataggcctgcggcagccgtaggacgaagacgttgtgctggtcattcacaacgagagtgttgttctgtgccatttactcttcctccacccacgcgtgggcatcgatgtagttgcttaccatgtcctgggcgaaccgatccaggaacccctccctctctttctctgacatctcttcccactcgtctcgtggcaggtgttcttcatcttcatggatgccccctgcgaaaccagtgtgaacgcggcacttgatcaccacgtaatcttccattctcatctcctcctttggagtaaaagaaagggccccgaagggccctgagggttccgtcttagaacggaatatcgtcgtcgaagctgtccacgtccgaagcaggaccctgagccggaggagcgctctgctgggttgctacggggcgcggtgcgggagcttctttggcttccggtgccttgtcgccgcgttccttggccagttcacggagaacggcttccatacgggtgccagccaggttgttagcctgctgaatcttgcgaatcacatcgcggcggagcaggcgggcggtctcgatagtcacgttgtcgaagtcgatcaggagaggcttctgacgaagctcagctacacctgcacgcatcatcttggccgggacctgggtcgcgccaccgaagctgacgttggtatagacgagcgggttgccgtccttgtccttcttgtcgttcttcgccggggtcttcttgacgttcacagtacacatgaacggttggttcagcagcggctcgatatccaggtcggtaccgtccaggatcgcggttgctgcacccggttgcattgctttcgccagcttggtcagcgggctgttcgggtggtaggtccagatgccaccttcgacgatacggccttcgccgtcacgtggcggggtcgcctggagggtgataccactcacttcaccacggaaggacttgttcagcatcaggcggtactgttgctcaccgatgtcaccaccgtagtccactacttcttccaccaggtcggcgaatactgccacctgatccacaggcttctgagctttgctctcaccgttctcatcaacgaagtcttcccggttttgctcgcccaggtagacgatcagcgagacgcgggcttcgtggttgcccggggtcggctcggggaggttgacgaactcacgcggggtgccggtgttgccagtgcttttgggacgcagtgccatgttttacttctcctatcaattaccctatcgggcggtagttgcccctaatcggggggtttgtcgcttgttagcgaacttcttcggtgacaatcttgcgagtaattcgctcgatgatccaccctagctgcttgccacccagttgagctttcatcttccgggcgtcttcccggaggctgaaggcgtaggaccggctggtcaggttgtacttgttgcagaccacatattcggtggtctcctctacttgaatagacatgatgtcctcctcatttggaacgctattgaagcatataagctattgaaagtcaaggacttttatcaaaaactcacatacttcaggttgctagctccccgcgcattgttgcagcgaggagcctattgaagcacaatccagaggcaatgtcaagcctctcggataccttccaccgtcaggtaggctagttcgtgttcaaaccactccgcgtcgttgggcatctccaaaggaaagttcttccccttggcatggttctctacccagtacaggaggaagtcttccaattcctggtgacgcatgttcacgtaatccaggatcgccatccctgtcggttcgctattacctttcttgctcatatttcctccaggcaccttagtggcaggtgccccacgtggttcccaacatgtaccctgcggacaggtctactcgtagcttgaagtgctcaccagcagctttgacagcctcgatagccgtctcccctgcccgactgtagcctacgaaccaaccgcccttcggggactctccgatgtcgctccagatttgacccgaggactcttccatctcgtccttccactgctggaccagggccttgcatcgagcgtcttccttcttctgaagcttcttctgctcctctgggtcctcgtgctgcatctcttgccagcccaaggcttccttggagaacatcttgaacttgaccaaatccttggtcacttccaactggctctcatcgtggtaagcgatgagctgctggcagtacgacttgttcttccagtcgtccttccagaagtctaccagcagaccttcagccatcagcttctggtcgtgcatgatcatcgccaccttggcgcagataacacctgccgattggaacaggctgttgaccagagcatgctccgaacgggtaggaatctggcggccatcgatcccaacgatgaacttcttgttccccttctccttccagaagtcggtgagaaccgtcttcagcagcgcaagggggctagcagcctcccagaaggcgtcgaagatggcctgggcctcctgcatagagcagccgacgatcttcgctacacgagccacctgagccccgtaggagcagccatacttgaccgacttggcattggtacgactgaagtctcctccgatgatggtggaaatcttcgccgccgtcaccgtgtgaatatcgttgggcttctcagccacaagcgctaccgcatactcttgcgctgcctggatgcacgcttcccggtacttggcgaagttggacccaaacttgatcttgagcttctgtgccgcagcagggctgagacgcattgccgtgctcaggcagtagtgggcttcgatcttcgcttccagggagtcaaagtcgtagccaatctgccaacacttgttggtgtccacgccgaacaggtttcgcatcggtaccccgtacagcgaggtcacacgaggaatgttggccacctgcttgtgtttgaaccggctggtaccagcaccacaactgtctgccggagttgcaatccgaccatcttcacgctggtaggccatgtaccccttgacaggcatgccgtcttcgtccaggtcgtccgggtcatacccaccacctaggatcgagttccgacgatggcgatacgtcaggtagttggtcacgtgccgaacgtgagggaacttctcggagattcgttccagggcgggacagaggtccttgtcctgacctacggtgaactccgggttggtccacaccttcaactgccggtcattgcctcgctccaggatgtactccagaacgatgtctgggttgtccatcatgaaggccagggaccacttagcacgcagcttctctttcaggtgctccaggcggtacttcttgaacgggcttgcataggtttgctcgatgtacgaggtcaccaccttttcgaacttctcgaaaggtagctgggcctttgtcttctgatccgacgaaagatcacgctccttccacgaagtcgggtcccatcccatatccaccagccaacccttgatgtgggttgtatcgctgatcttggcaggcacctcggtaagcaagcttaccgtatgatcgaacggtaggccatacgtcctgccgttgatttccacgtagttgggagcatccggccccgaacgtggaaggtgcttaccgcccatcttctccaggaacttctccatgttgctggagagtcccagaccgcccttgatcttcttctcctgggtcttcgggaagcaatacttggcagcttccgtcttggtcggcttcttcgggggaaggatcggttcaacaatggcacgacactcctccatcagttgatccagctcccggacgttggcctgggccaggcgctcgtcgaagaagaaccccctgtgactttgacgggtcaccacccaagccacgtagctttcggtctggactgccggagcccagttccatgcaccccactctgccatcagagctttgtagaccagcaggttgacatccacgtctcggacgttgtactccagcatctccgggtgatacgtcttgaactctgcaccacgaggggcgttctcggtaatcaatcccagttcgacagccttcgcacgccaatcgatcttggccaggcccagcttgtcaccccaagccccaatgccgtggccagggcgacggtcagggttaagggttttggagattaccagggtgtccacgatcttgacggggttaccgttgatggtgtccttggtctctccccacccgatggtgtactccagcccgcatgtcagcttcagagccagcaagtcgtagttgataatgttgtggccaattacgaccgagcactcctcacccagccatttggcgaagtccatcacctcgtcaggaccccacttgaacacctcgtcggtgtcaatgtcccgagctacagcacagtgtagcttgaaatcctctttcaggcgccagggtgaggcggtgtaatccaccgtcccctctccgatcagcccggtagcctcgatatcgaatactacccggcgtttctgtacctcttccacgttactcctcctttcatccgtcttagaacgggatatcatcgtccccggtcggcggcgggccgtccaactgagggtagacgggagccacatcttccggcgaatgaacttgctcgacacattctgcttcagggtattgctctaacccctcagactctccatgtacctggttgtactcctccacctgctggttgaggaagtccgtcagggaaatcaaggtgtgtgtcttgatgttgtacaggaccctccccgctggcccggtgtaccctgtgtggcggcatttggtaagggtcaccagggtggtgttccgttccaaatcgtcctccgcgtgcttgtttcgcaccagggtgatgttgatgttgcccgacttgtagatggtcgaggagccaatgatgtcttcctcgctcagctcagcgccccggcttgcagcagtcttgttgtccttgcccttacgggtgtggttgacgttgatgaagattacatcgtaagccttcaccatctgcttctgccacttcatgaacaacgcctgttcacctgtgtccatcccgtcgatcaggtcggacattgggtcaaggacgatcacctggatgccccccgaaatgatcatctgctcaatcttctgcttgatcgcatcgtggtccccccgatcatccaccagcaggaaccggtcagacccatcagcgttgaggaacagctcgttactcgcctgctctaccctgtcagattcgattgttgccaggtactcctgagggtcctcgatcagggccagcttctgtcccaggtgccgggacagcaggtagcccccgtactctgcgatgtcggcctccagggtgacgatgcccatcttgtaaggactgttgaaaatccaatggtacaccagttcgttgacccaggtggtcttaccgatgccggagcctgcgatcaggttgacgatggagttcagcgggaaacctccagcggtcttccgagacagctcgtacaggaacgagggcaggggcagcttaggcgccattgccttgttaagcatagcctctcgaatctgacccgaccccacgatgcctgccggggatgccttgcgggcgtcgaagaaggcattgatgaacgccttggcctgcttgtcctccaacatcttgttggggtccttccctgggaggttggcaatccgtaccttccccatgggcagcacttccagcgccgcctgagcaccctgctctcccttctcatccgcgtcgaacatgaggatgatttcgtcgaaagagttgatgtactcatagttggcagccaactggctggctgccgaggtttcacccacagtcggacttacgactggatacggcaacggtgcatctgcgatgtccgcgtaagggttcttcttcttccagcgctggagctgatcaactcggagcatctggtaagctgcatgagcatcctcctctccgcctacaatgaggaggtatttgcctccggcagggaacaggtgttgaccataaagctcgcagtgtttgtcgttccgaccgatggcatagaaggacttgggaacctgacgaaccttgtatcctaccagctcaccgtggtcatggatcggataatatcgcaccacaggctcgttgtctgcgtagtgtgtgatacacccgtacttctcgttggtctgccgggctatgccccggaacagggtcgtgtcagccccgccgttgccttggattttctcccggtcttcggcagtgatgacgggcttgcgttgaatctctctcacttctttctcctctttcctcctctgggcctgggcacgtcgatcacctttgatgatcactgctcccaactcttcccccaggggagaccttgccagggtgttgttcgaaaccattcgatcacaactgaaacagcgtccaccgaagacccccggctcgtcctcgtagaccgccatagcgtcgctgctatcacatcctggcaggacacaggcgaacttcccaatcagcacttcctactccttctgcaataaaaagggcccacggagggccctgagggttacgccagcaggaggggtggtggctcgggaggcgggttgttcgccttacgctccttctcctgcttgtcatagaggtgcttgtagcttccacgctcgcccttgttcaaagggtaagagacttggaagactccaggaccagactgtaccacagttacctgggtaaagtcaacatccattcggatacgttgcttcaccttctcgactgcctggcctgccgtgaggcccattacggtgaggatattaccatccagcttcagctttgccattattgatatccctcctccggcatccggtctgtgatggacagtctcagtccgatcacgttttctacagagacctcctcttcatccccgtgagggagtaccgacaccagcagaaatttcatgtccggggagtaaccgaacacagccccagttgaaacggtgtcatactggactttattggcactacctcctaccccatccacatactcctcttctcggaagaggatgacttccccaggaagagggagttcagaccacgggaaatcatcctcctggcgcaggccattgtagggtaccagaaaatcccctggtacggcgtacataacgcgaaggcgtccgtcaacatgccagacgatcccgtatcctttttcattgcagaggttcttaaccttgccggttgtgctgatcccgtgggggatgtagaacacgataccgatggcacctttctcccggaattccccgaatagcgtgcccttgctcccagacacttccgggtccggatgaatgcacaccaggtcaagcatttcaaatttgctcatggtacttctcctgtgcaatacgctcttcgcgggtttgacgtttgcaagcctccaggtacggtaagatcatttgtttcagcatgttccgggaaggcaacactcgttgaatttggtcatacatgtcgctggagcccggcatttcggacttgtacccttgcatgaagttggcccactggtccatggcatgaaccttgtggcggctttcccatacgcactccaggataccatgcattcccaagccctcccgcagacgttcacctgtgtctgggcagatgattcctcgaagctcaggcagaaccatcagcaggacgatctttgccgcctgggtcaggccggggtaaatattctcagcagatacgggataaaagttgatttcgctcatgtttcctcctgtaaggcccggactagccgggccatgttgatcagtgttcgaagccgtgaggagtatactgcctgaaacggccctgcatgtcaacccagtagaacgactcattcatgatgtccgcctgaaccatgcccagctcgaccagccgggcgaactcttcgtcatcccgaatctgacgagcgatttccagggatttcaggatgttttggaactgcgactgcatggactctccttactcgtgtttcgccagccaagattggctgatagctttgaaatgggggtagtgaccgtagcggttcttgtctaccgctgtgaaaacaaggccttccctgttggtggcaggattatagctcttaccttcagccatggcaaggatgtcggcataagtgacatcttcaaacacatgctgagtcgagagcacaggcacatgcttaatatcgagagtttccgccagcatcctgcaatactctggggactcgtaggcaccctccttgatgttgaagacactgaacaagaagaaggtgggtttctccagtttctccttgttgccctggatagccgggccacacacctcgccttgaattgcgaacggctgtttgctgagttcatagaactctgccaacttgcgaggaatgtcctgatccagtacagcctggccaaagtggttgcaatcctcgaaactggggaaatcagtccaggtaggctccaccagggtttgattccggcttgccatgccaacaccgtcttcatttacccacacagtgcaactggagccatccatcttgacggtcacctggtacggcccatctgcgatgatcttctccagagggatgttctgaacccgttcctggtccgtcttcgggatgtatcgagggaacgtgctgacacgggagacattactgttccctgccgccacctcttcaggtttctcgtacttcagcacaccgagcatttcatccagcggcatcttctcgttcagatcgtccaacacctcttgcacgggcgctttctggagccggcgaaggatgccagcttccaactgggccaggcggcctgggaaggctcgtagaggaagggccaagccttgtgaggtgacacctcgcattttcatggtccgcagtcgggagtataccacctcctcttcgcctccacactcgctggggcagccttgcgacacggcataacacactcctgccatctcacaatccatacccagggagcaggcttctttcttccgggtaaccttcaccaggttcttggtaaggtgggagaacgccgggtctgccacaggtagaaggctgtcaatctcaaagtagactgccaggtcgccgggggacagcacgccttttgggacgatggtggtccagcccccgaagaaggccttctcgatccggtctgcaccctcgatgggttcgatacctgacacttgacgaattgaagatagtttacgcatgtccgttttcctcctggaaatcttgaataaggtccccgattggacctgttttgacggtgtacatcacctcagccggcgtcttctggttgaggtcggcgatatattgtggccaatggaagaggctgtgcaactcggcctcggtcaacttgagaacgtttcctgcatccgttaccacaaggaacaggtcaagcttagggtagaatttccacggcacagcacagaagatcaccccattcccagttactcgtccatccttagtcgccaactgggcccctatctggtgctttccttccgaggggtgaaactcttcagcccactccgggaggatatcagggcactcaaaatcgtcgtccatcacgtccatcttacttctcccagtttttgttggccaaggccagggcttcttttgcgggagcgaggacgctcttaatgtccttttcttcccagcccaaaaggataaggctggactcactcatccgacacagacgctccagctccgctttcatctcccgggcagcacacagggtagcagcatgctcttccttaacatcagaggcaatcacgtactcgatcaggtatccacccctcactttagggagggcttctcggatgtaaactccgtcaaactcgctatccaccacttcccacgttctgtgtttaacaccttccaacgctttatgttccatgcatcctccttcaaaagaaatggggccagcctggctggcccctgttggtcacttgtagacgcggttctggaagccggggctggtcatagcctcatagggtacgaacaccgcagaggagttcttggtcatttccatctgaacttccagcgccttgtactggagcagtcgctccgacaggcctcggttggtgatttcgttctggtcggccagggtacgtgccttggtcagttcgatttcacgatccgcctgggccagcttcagggcgttctcacgcttgaccatctcgatagcctgttcgttttcggcggtcttgatagccagctcccgctcgttctgagcttcgatagccttcgtgatcacttccgggtattgcaggtcagccaaggtgatgttgctcacctccaaagggctaccctccattgctgctaccagttgggagtgcagggcttggttaatctcgtcgaagttggctgctacatcctgggtgcggtacttgcccaggaccgagcggctgacacgttgtaccacatccttaccgtagacaccatacacctgctggagagttactcggtcattctccacccggatatcgttgaacatggcattgatggtgcgctcggtgccggcgattcgagtacggaagcgtaccacgaacgtcaggtccagattgtcggccatcttcactttcaggggctcggcgacggtctgggtggagacatccagcatcacgatacgagtccacggggcacgccagtgacggccaggttcgaggacgttggtgctgtagccactaccgctgaggtgcttgcctttcatggcaggcggtaccacatccgagcagcctgcaaccagggccagggccaggacaatggcgacgccacgcatcaggttcttgaacatctttcctccttacttcaggttgtttttcgtttcgatggcttcgagggtcttgttgaaccgctcttctgccttttcacggtatgaacgatactcctccttctcccctgtgtcaacagttgtgggatgggattggaacgtgcccaccgggcgaatctcttccaccttgtagccgaagcccaggcacgataccgagatgcagacgatagcccacacggggtaccacttacgccaccaggacgcttgcggcttggtcatgtttcctcgttcaacctcgctccgggtcatcttgatgataccccagtagaccaggcaggcgactgcgataaggcctgccaagtggtagacgctaacgctcaggtagatcggcagtcccatcacttcagccaccccaactcgatagccttttccagcgccttgataaggaagtcggcgtgcatcttgtcctccaccagaagctcttgttgcacgatatctcccggcattccaaatgtagcttgtccttcatcggggtacaccaagcgcacagctccgggaggggcctctttgcacgtgatcaggcacacattgctcatatcgtcgctgatatccgcaatccggatggtatcgaagggagggttgggttggcggatgtcgagttccattggtacctccttagcaggcgaaagtcagagtttcgaaggcttgtttggcatcttgggctgtgaggaagctcaggataataatcccgcttgtgaggcctactcggacttcttccttcgacgcagggatttccagcccggtgacgtgtttggggttgatagcgatcattgcgctattggccaagttgtttcgttctttggtgaaaattaccatctttactctcctttcttgcaatagatgcgggtgatagggcctgttcgggtaacttcaaaaaccccttgttgtacgaaacacatcctggacaggtgggggtcttttaaagaccttcgatcttgttcgtagagggctatcgctgcttggctaaccaaggccgccagtatcaacagcttagtcctcttggaggctttctggtaagcctccttgaggtctggaatcataacagctacttcgagaacttgcaagtgtagaaagtcagccggtctcctttcagagtcacttccaacactccagctcccgcctcgcatttggtgattgcctctttcacggcttgcaccttctcagattcgagcttcacttggttctcttccaagcgctgcatcatgcccaggaaggaaaacatcatggtgagtgccaggataactgctaaaaccacgacagaccatgctttcatatgttgcaatttcaaatccctcgctagttcatccaaagtcgtcccttctttcacccacctcacagcagggcttggaggaggcggtggaggggccttccgagtcgttcgaatatactccactgtcggaggcggatcgagcggtttagtcacttcttacctcccttacgcgacttaacagcttcagcttgaagggccttcagtttctttttcttggccttcttcttgtcggtcgattcctcctgggccgggacttcaacctcccaccggctgttcagcgtagcagggtacggggatggcagggtgagcattgttgccagcgcacatgccagtccgagggctgctgtactgttcttcattgttcctcctttatattcctgtgtcaacggttccagtgattctttcgcagttgagggttcttgggggctgtacggtgcttcttggcgcgcaggtggcgctgatttttggaaagcttgtcccactcatcgaagatcaccacgagcttatcacgggggtcctctacctgggcgccgttctgatcgtacagcttaccatcctctagaagcataaccaaccctccagaagtcagcatggctgccaatacacgctgctccagggccgagaaatccatggccaagagagtcttccacaccctgttggaatcccgtttgggcatgttcacacggagagtggcggttactcctaagggagtccctttgtggtagtccgagtacactatcccatccggctcggcgatcaccgattcaatgtcaaatgttgcgtcgatgtaaaccttatccatggaacctcctcaagctgttgatgtggccactgtatagggtgttgtgggggatgtcaactacttttctccgggcgtgaaaaagccccaccagcttgtggccagtggggctcatcttttccgcttgaggttgtcctgctcttcttgaagcagccgcatctgcttagacgtggtatactgcatggcattgatttgctcttgcagtctgtttgttcggatatcgaagtctcgccgcatctcttccaggctgagccggtactccttccggatgatgtcgaactggtactcggtgctggtcacccgttgagcgtagtagaccagaactcccaaaccgaccaccagagtcagcagtgtagcgaagagcatccccaggacggtgatttcgtgggccttcgtcatgaggacacctctcgtttaccgctcctgcttcatcatctggatgatcatttcggagtatttctgattgacctccatcttcttgtccaggtcccctagccgaacatccaggtagttcaggatacggctttccgtggcaaccagtttttgctcggtcacagcaacagcttggagggcatacagcctatcctccaccttaccgatctgcgtctgttgccaggtggcccatgccatcagcaggggtaggaggaactttgctgccaggtccagtacatacttccactgggagtcttcgttgttactgcgtgcggctgccatactgggcctccaggtctttgtaccactgctggatgaagtggagtttgttgttggcgcaacctgctgcaccagtgttcaggacgtaccccttggccaaggcctttacagtgtcctcttccaccggaaagattacacagggggttgtccactcatttgggagtacaggcaggatgacctgcgggggctgcggcacagaaggcttcgttgagcaactccatagtcccaggagagagacgctcagtagccacatgcccaggaacgctcgtaggcgcatctttcacctcgggtagggtcagtgtaggggtccgatccaaacgttgcaccacggagcccacagaggcctccagggtcttgttttgaatcaccagttcctcgttcatcgagaacacggacagacattgctttcggaaggatcggtacgatgccgatgcttctgcgtagctggcctccagagaagccaggctctgctccagcctgtcgattttctgatgactctcccggagaagccaggagagccccagaacgaggactaccaacgctatccgcatggcagtcatcagtttcatttttcctcttcctccttgggaatctcatccgatacttgaactaccatgccccggagggaggtttggacgatgtaccggcctgctgcaatcagcatggagacgcctgccacgaccttggggtacaggtcgggaccgagaacacctgcaagccctgggatcagcggctcgaagatgatcagcatcgagaggatgaagaggaagatgctcagcaccactgtactgctacggtgcagcttggccttttcagccactagcttcagcatatgctttctccaatttcacgtcatacttgttcttggcgtagcctggaccgttgtacagtctggcaaacttggcccaatcatgggctttcaaggcagcatgcgtggtgggttgtgccttgatgaaccggcagaaggcgtccatctgggctccttcgctggcgtacatggcgtttacgaaagcttgaagggtagggtaccccatcagcttccagtggtagcccatgatctggaacattccccaggagcaggactccagggcgctgtccctgtcgatctttacggcgcgggccagtttagcgtgttgctcgctgtattttccatacccaccagctaccttatttaccaggtctgggggatgaccttccgtggggagacctttggcctggagctgtcggtacatctggtgacgctcgtagaggatcgttggctctcctgtaggctggaagccccctaccggggcctccaccttggtcactgccttgatcgctgggacatctactcccaacatctcagcagcttgctgatactctctgtcggtgatcatactacatcccgtagatggtggtgatagcgaaccagcagaacggatacgcccagttgccccagttgcacgatacacggaactgagtattactccactggtccgtcatgtaggcgcctggcccgatagaggcgttgaaagtgcccatcacagttacgctcacgttcaggattcgagcctggcgtggcagccggacaatcgtagaccgatcatcgtacagtgcagggccttgaccccactgaaggatcaacccgttcggaagagctgcccagccggatgcgctggaggactgttccgattggaagtccaggcctgtggctcctgtgggaagccccagggcatccaaggtagcacatcctttcaagcccaggttgttccgggctgcttgtgcatccctgacatctccaaggttgttcgccgaggttaggaagtctcccgagttggcagttgccatagttcccaaacccaggttagcccgtgcttgagggacgttggtcaaccctgccaggttctcactcttgcgcattacgtcgcctacaggcagtgtagcagtgtctgtgagccccaggttagaccgggctgtgggcttgttggggatatcagccaggttgctagcagtcttcaaccaggtgctctcagggaggagcgctgaagacgtgatccccaggttagcccgtgctgcggctttgttgggaacatccgccaggttgtcattacgcttgagccaggtgttctccggcagcacagcagagctggccagccccaggttcgcccgggcaagctgcttatccgggaggtccgccagattctggctcttatacagggtgagtgctttcaggacactcggtgcaatcgccttgttctcaacggtgcctgcgtatccttccgcctggcttgccaaagcgatgatgcctggtgctgctccagctcgggggtacaaggctggcaactgatcccttgggactgcatggcttcctgctgtggcgggggctacagcaaacacctgcccggctgccccagccttgaaggcgtatcggacatctgtctcggctttggaatataccgagaggttttgcctggccatggcaatgttgctgatattggccagtgtttcataatcctttttcaaggattgaagctgggaatttactttcgcagcctcaccgtacctctcgaatgcgggttcccagtccaggttgcttgccggagatacggggtcaacacctcggctggaccgtttggccttgtacaccaccccatctgaccctttggccaggctggtacccccttcgtaagtggtggcggcatcccacatggcgatgccttgttggttgatgtgggccagggccttatctaccctctggaaataccagttgtgccattggtagggagggatttcgttggtccagcctgtcatgatcttgtttggagcaggcttagtcgcctgcccaatagatgcccagattacggacaggtcgtcaggttttggaagcggcataatctttcctcaattcttggggcggcgcgggcggctctttgcggaagggaatcccgccttttcaggccactttctcagagctgagcgatactttcgccaggccttctctttgaccgcatcttcatcgtctatggccatttctacttgacgatctgcatctcgtagttcattatctctccagttacgggcatcaatgaccaaatcccggtcagacacatcttccgggactgggatgtcacccgcctcaatggcagacacaatggcgtcataaatctttttagcattctcgtcgtagtcgcaggcgaagtacggtgaccacccccattccgggtgtttaatctcacactcataccccatcttatactttacaacgtttctgaatttcatcctcaccttccaggtagaagtaaggggccgaagccccttgtttgtttaggaaatgcgttgccacagggtgatctggttaccaccccctgcaaacgctcccatgcaacggtactgcccggctgccggaactgcccctgcggtgtaactgatggtagagtacggtttcagttggctccctgccctaatggtgccaggtcctcccgacccgcctgactggtctcctgccaggatgtactgccctacggcgtcccaggctgctccagctcgggcaatatcgttaggaatctcacccttcttggcatataccgaatccacccagttggtaagagagccgtaggtgccgtaagcggctcccgtaatgttccctgcggtgttgagaatagcttggccggcgctaacgttccctgttgcattcacgttgccagaggcgttcagcgtggttgcgttgacccttccgactacagtcaagtcttgacctgtcagagtcatacctgttgagccccccagagtccggaaattcatagacccgttggatggggcaccccaaatcagacccaactcactaccgtccgctttctggaagccgatatgggcattccctgttccagaagagcggctgaagatgttcgagccgtacccgatgatggtcccataggcattgatgcctgttgcgctgaagcttccgtttgcatccctctgaactagggagttggactgggcagtggttacggcggggatttgagccgagttggccagccctgataccctcgcaaccggtacggtaccgtgagtcatcgtccctgtctggtcaaaccggaacatccacgcccctgtagcgttgttgaacccccctactgccgtaggttgagccacaagataaggaccattagcccccagactggaaaacacgttagaatcggtggaactttggctgaatctgtcaagtcccaggttctctctcgccgagttcctggagggtcccaggtcaaactggttccctgcgtgaaagatcgggttattgccaatccttacagatgggtccgtttgatcccggaacgcaaactggagagttttatcatccaatacagcaagactaatccagttgttgtccgagatgtttctcaacgccagttgggtagtcttatcactccccgtcatcccagcaccattgatgtgcagcctggccaccacccctgcataatcaggagtcagcgggggtaggttgatatcctgggtgccatcgaaaacaaccccgttaatcctccgacctgtctgcaaacgggtcgcagaagttgcattccccgtcaggcttccaattaccgtaccgatagcggcagtccctgtggaatctcgggaaacaactgtgctagcctgattgatggccgtggccgtcatggtagaagcgttgccaagttgaagctgcgacctacccgttgctgcgtctgctacgccaatccagttgcgaccaaacggggtcgttgccaggttggccatggaggtagccgtattgaaatacgggatagctccagctacaggtgccaggttggacagccacgtgagctgggaagcactcgcttgagctttcagctctgcccgccaggctacatcggagctaaggcccataagccctacagtgtaggaggtgattccacccagggttgcttgtcctgaagcgttgtagaacgggaatctccacgcagttggggtaagcgccgtcaaggactccagagctggagaccactcttggaaagcccggttccagttggtgtttcccgcagtcgtgccaggctcactgttggtatttgtccgagaggccttgtacactacaccgttgcgttgtacataggaggtgtttgcctgatactcggtctcactgtcccactcaggcaagcccttctggagcaggtaggccacgttggtgtccaaccggttttgcaggtagttcaaccattgccggggaactacctccacctcccagcccttgttcatcttttccggacctggggcggtgatatcaccagagacgccccaaatcaggttcatactgatcttgttgatattggccattttgctctcttacgttagaaggttcgacagaataccacctaccgaggggtcgttcaggtcacctgtgccaaaacctccctggaagccttcggtggcaaacgggcggtcagcagagaattccgaataggtgtagttcacacccaaggtcttcggcaacaggctggccacgttgcccagctcgaacagcaaacctctttccacggtagaaagaatcttcccgatgccgatacggcagttggcgtttcccagttcgtcgatgatgatctggctagccccaaacaggaacttgtaggcttcgatcacatcctccggggtagatagcgtccggttcttcagaatcttcgccttgatcatcaggcggtactcttcgtccgttgcctcccgggaaatctcagtagcttgccccaacccccaccaaggtgccccgactgaagggtcgttcaaggaaccgtaaggtccagcgttgcccggggtcggtagcggggttgggttgtcaggacggtctttgtagccgaagaatttgaatatctcggcagtgacaagactccggggaagacctacaatctcccccagaacgtccaattgagcccctactgctgtgtccagggtccgctcttgctggacctggcgcataacctcttgcagttcaatttgagcctgaagaagcagctctacgaacttatcgaagatcggcttcttcttgaattgctctgtgtaccggctttgagcgactttcagaaagtcaatcatccggaactggttcttttccagcatatcaggtcaccgtgattgcaatacgggtggcatcgaaaatagccacctcgtcataccctacagggatgttcgccatggcctgggtgccccctttctttccaatggtcaagctgttaacctggaaccctggaacgctgttaatcggagtgtatagtctagagtataccacctctttaccaattttgtccagcccatcttggtacgccaggatggcagcagtgacctgttcctttacatccccgggaagaacctgacctgcaatggcagagatgtttaggttgacctggacctcaatctctttggctctgcggaatccaatggagtgaaccttgccctgggagtccgcaatctgcaccaccgtgtccccgaaggcttggatacctgtaggcttcttctgccaaatcatcttgccgatgtcagagtcgtcacccccatgagtgatcaccgtgaaggcgtggggaggaacgttatgcaccgagtcatggttgttggtgtcattctcaatgatggtcacatctcgcaccccaggaacttggtgcatgccatccagcatcgcttccaagatggcagcggcctggtagaacttagaattcctccaacgttcccggagttcgacatccgtctccctgaacctgccggatacggcattggtcgggttgtacaccgaatcccagcccaggatcggcaccgagatggtgtcaatcgtccctggaagttgagtcgatgggcccatttgggtatcctctaccaccccgggtttggccaccttgattggggtgatgcgggggtccaggtcgaagtggacaatctggagacgattcctgcgacgggcccagttgtagttgttcttggcatcggtctgtgtttcgaagctggtccacgactgagataccttttgacccagcatggtctgaatagacgttgcagtgtccgtgggtgtcgcggtgtacgtggcatatacaaagttgctgccaccatccgtcgagtaaccgatcttatactcgtgtccagcttcaacagccgtgaccctccaggctacccctgaagcctgttgaaggttcatcaataccggggtaatcacccggaactgcctcaaggtgacgctggaggatacagagcccaccgagctgaccacgatgttgtagttaccctcaaacactacttgagccctggtgggctcttcagcgtatcggatgatacctgagagagcaacttcgttatccagagcgtagccggttgccacgttggggttgaaactgtcatgcacctcttgcagggcttcccacagctcagccacgcttggggctactacgccaatcatgcggcccagggtagagttctcactggtatctactacatcaccaggttcaacttcgtcagagaagatgtcctgggctcggttgtggtactgctccagtacctcaggaaggtaccggatttccagccctttgtcagtcaatccagccatttatacctccagcggcagtcgcacggctacttcttcgttggagtaagtccgcactttgaattctaaggtgaagcgccgagcaggcgcgttgtattcgcttcgatattccaggatttccttcaccccctcatcctcagccaagaggcgttgaaagatgatgtccaccgtcgccttgtgggccaccttggtgaggattctttgacggtagggcacccctacgtccaggttcaagaaccactcacccaggaacgtccagagcttgattttgagcctttgagctacaatctgaacttgcccctgagtcacaggggtctgcccattcacgaacacgatgtcgtgactattttcatccagtagaaggtccataatccctcacgcttgtgggacggcagtagtaccaccgccaggcataacccctccatgcacgtgggtgtggaacggaatgccgttgaatgtcgatacacctgtctgggtgtagtttccagagtgggtgatgttccctgtccaggtggtattctgtgcctggactttcagggccggtgtgttcagggtaatcccttctgacccttccaaggtgatgttccgggccttgacgttcacgtctaggtccgtcaggagttcgatgttcccattctccttcagcctcacctcgcactccgttgcagtggccaggttgtgtgctaccaccaggtcgtaggtgctgtgaggaaacttcctgtgtgcagggttattggggctgactgcgaaggggaagaccccaggaatagccacagcatcacgtccactgaaagttcgagaccccgtgggcttggtggggttcccggtaccggctttaaagttatcaatgcctcgctcgcagaagaccagtagaacctcatctccggggaacaaggggaagctgaccaaggtccttcgagttcccggcatttgcacaggcacagaaagaatggtaggctgctcctctgaagtcccgtcatcgtacagccggttaaccaggggctgagcgtcaatcatcagggtctcaaggtctttgtagactcggatgacccttcccgggatagctgttctcacattgttcagttgttgctcgatcagcgtgttcaccacgctgctgaaacttagttcaatcatctgaggtcttcctcgataatgatgccacagaagcaatcaacgtaccattcctggtcatcgtagcccccgtagtacctggctgagttgatccgataccagcctgtcacttcttttgactcgatacggactacttgcccaggggcaaagtcggcgttcaacagggctttgaattgaacaccttgcgtccgcctcttgtctcccttctgccgattaccttcagaggatgttcggtaggggataccgatcaggccagtagattcgttcagtaccggggccgacttgatgtttttgtcgtgaatcccgttgacatcgttgacgtagagggcgcctgcatcacaccgccactccatattgttgtccctgcaaatgtcgttcaagatttcctttgcactcccgtccatgggatacccgaacaccacggggttgttgatattggtccctgaaaaaacaccccgtaccacgccgggcagttgccccatagcagcttcaatgacatccttggcagtctgccccggaggaatcgtctgcttgagccggatgtggtttaggtcggtgtacccctcacccaggatgagctgagtcaccatgtccgggccctgctgggcagtccggcgttcaaccacgttgccctccagtaccacccgggttccggctgccgtataccctacttccagtttgaccgacaaatagtccgtatcaagcattgctcgggtgcttgctgagaggttgtacagttcgaccgtggcactgttggacttcttcttgttgtctgccgacttgctgatgtcgaaccgcatgtgtacatccttgatcaggactcccttgcctgtccggtaatctccaacggtgagcaagtacacccgttcgaactgttccatttacacctcctcgctatcgtcgtattcctcaatctccacgtagtacagttcgaagaactcgttgagagtagagatatcttcacagatgtcgttcttgtggttgtcggggagaactagaaaatacccgttcagcccgtacctggcccatccgtagtcatagcctagagggtagttcggaaccaacttcatgttccgaatgataacctctccgtccatgttttctacggtcatgtgccaatatcgttgcctatccgaccaagaaaagctgaggtaccggatttggtcccccagcttcatttggtaggcgtattgtgggtctcggtaagtgggtagctccaccagcctggcccgctctcggatagccactatcgcacctcccggttagtcatcctgtgcaatacggtttcccctttcgggttcttcccgtctgcatccgttaccttctcatctttcggggcttgcttgcccttggcctgcttctcgctggccttgttcttgatcgaatcgctcaccttcttgggaatggctgccgtctggaaggtggttgtcctgatcacctcaaatgccaggtccacatacaacgactcaccgctctgcgggtcttccttgaagctgatcgaggtgatcaccacgttctggaagatggtcctcacagcagagccttcgaagtccagcaggacaatcctctcacggtccctggtgatcctgtccagttcttctcggatcaggtttgcccccttctccttgggagccgctggaaccaccacggtgggcctgtccaggtccaagaactggttgaccgtctccgggaggaagttcgtccaggccgtgtctgcccccggggtgatgatggggcccgatgtcactggcgtactattgacaaaaggcttaggggtgatcccgaaagcctgtgcgtcagcagccgtaataactggcctgtccaggttgaagtcagcgtcagagacgacccccgaaagggtcatcttctgattctgagcaatcacatggtcggtaaccgaagctcccgattctaccacgtgctgagtcacctggttagcccgggagatgttcaggttcagaatcgcatcgaaccagatgatatccccggactctcgttgaatagctaccgtcatttcttgttctccgatgcatccaccatggcctggcgaagagtgtcatggaagctgtccatgattcgggtttgaagcatctcgctgaactccttttcatcctggatttgaggagcgctctcaatctggatggggatgttcagggtaatctgccctacactgggcataccacccaccccgttctccgctttgaggtactcagggactcggcgaacaacgtcttcatctatgttccgccccatgtcattctgagcacgtcgggctcgggcctcaaggtcctgccggaggtcatcacggaggagcatggttaccgggctgttcgacagcgctacggccccggcgtctccagcaagcttcgcagccttgccaaaatccttattcttcagggcttcagcagcctgaaccagcttggtgatgactgtcagcacggccagaatcttcgacgtgaagaagtccagcgcagtggagaacataccaccctcagcgaaccctcccagcagctctcccatggcttcagccaggcgaccaaccgcctctgctgtctggactactgccccaccgatcttcagccacacagcttgctgctctggcgtcagttggttgaagaagtcgccaattacgctatccttcccttgcaggaagccgacgaaatcctcgaccaccaggaacaggccgccaatagccaaggcaatctgccccaacgggaatagcgcaaggccgatagctccagccaaagccatcaactgtccagatgtcagtcccagcttgctggccaggtcgggtagttgttgcagcatctgacgaatcaagatagcggctgcctcaaacggggaaaggagccactccatcgcagcacccaggccttttacagcctcctcgttatcgttcagcgtccgagccatctccttgaacaggttggccatgccctggcccatgccgttgttgtagatcagccccacagcgtccgaccaggcgttgttaaagcgctgctgttgggcagcagtggagttctgcgccctggacaacgcaccgccttctcgggccttctcggcaatgatacgagcgaactcgggaagcacgtccgttcggaccaaccccttcgccatcatatcaccgagttctttggtgctaatctctctgccttctttcgcagaaacagcctgggccatgaggctcatagctgccgggaaccgttcacccaactggagcttcagttcctcagacatcacctgttctttgttcatcatctgttcgacggcgcgcaaagaacctttcatggactcggtatccaagcccattacggtaccatactctgtcatggaacggaagatgctgtcaacaacatctttgtccattccggcgccctgtccagaggccagcatcttggtgtaggaaggtgcaacagctcgccagtcgaagccgacctcgttggccatctgcttgaactgtgccatagtggcttgaccagcttcctggctaccacctaccgcagccatggcgttctgctgggcgatcatttgctgacccatctggttcatctgggagatggcaaacgcgcctcccaggccagggataaagcctcgtccccagtgggctacagcagcccctgcaccagcaccagccatacctcccacagcatgggcattcctgccccttacctggttgacatggccttgcaaatcgattctaattctagcctctcggcgaatctgggccaggacatccgcaatctcttgccggaggtgagccctgtcaaccgacagcctgatatttggcgtccgcagagtgatagtgcctagcctctgaatcactgcgtcgatggtccgacgagcatttcggtagaacttggactgactgatgtcggcattcaggtgaagcgtgaagcgttgctcagtctgccgcttccatgccaacagggcttgctctgccttcctcgctcgaatagagacgggaatttccagagccaagccttgcataaacgtgcgaaggaatcgcttctgttgggcgatatccttgatgttgaaacgaacattgctcagcgtgactggagtgtttgccagtcgctcactgagcttcttgaccatcgttcccagggtgtcctgggcgatgtccacattcttgagacgaatctgggcattggtagccattttgatcttggctgccaggcttcgaccatcaaggtcaaccctcatcgtcactttcttgttggccaggccagccacttcgttgaggcggtctctgacctgttccaggttcttcttgaacgtcagcagggggcggttatccgccctccactggatcgtcccgacgagctttgtaatctcttcagttgccatcttgttgcctcagcttggcgatttctcgggcgatgtctgcggcttcgtcgtgagctgcctggtactctaggaggtcatataaatcctcggtatcgtacagcgtttgcagctcgtgaaggctcgccaggcgcagagagtgcgtcaacacctgatagacctcgtagtccttttggaactccttcatgagccgctttaggcgggggtgtaccatctggtcacccccctccccacttactgttgaccgtcgaaaccgagtgcttgaaaaaccgagccgaagttcagcttcactacctcagtcaccaactggaacagcttgccaaagtcagccgagaactcctcgttgaagttgatttccatgttgttcttggacacactggtcatcatgccgatgatcatcttttccacctcaacctcgtcgatccgctcaaccaccttgctgaccagggtggcgatgtccatcgaacctgcaccctctttcgagcctacgcctgcctctgcaagggccgggccgagaagcttggtgagcatcttcaggtgagacaggccagtggtagccggcatggaggtgatcaggaaacggtcaccgttgatttcgatggaatgttgcttgcgtgccatttgggctctccttttagaattggtctaagaccgagttgattgcattacccgcagccgtcttcagcccgtcgaagctgaagaagtctagggggttgttcgaaccagacagatcacggtccgttactcgggcaatctcaatcgtccacacagggttgtcaaaccccaggctcctacgggtctgggggtggcctgaaatccaggcgttgttggtgtagatgatggtatcgccgttgttgtcagccagggccaggtctagcctgccggactggttaacgcggtcctgtgtcaggatgtcgaacaagacatcgtttgtgtccgaggtctgaagaagctctactcgcatacgtgcagactggttgaggtttcgaactcgggtcacctgaccccggatgcccaccactttacggtagacctccatgtcccaggcaacctcaaccgagactacacctacgcattcaaactccgagattatcagtctaacatcctcgggggcgtaagtcaacacacgctttgtcatcagataagtccgtactgtcgaaggattggaaggatggctgcgccctgactcaggtagttctcgaagtcagtaaggtcgctgttcccgccgatccggagggtagcgtcgtagcaagcgaatcgccacacgttttctcgaagagtacccccaaaccctacggtcggaggggtctcaatccaggcagtgcctgcgaagaagtttgtgtttcccagggtgtctttcaccaccagcgggaacttccccttgcgggtagctgcgtccaggttgtaaacagcgcccaggaagtcgtttgtaggcgaggactgtgccaaggtgagggtcattcggtagccgtcatccttagtgtagaggcgggccactgatccatccatagctcgctgagtctgggtcgcttgaacctctttctggatcgtgacgaactccccctccgcgtatccggtcacttcatgggctccggcgatcaggatcgtaacctctcttggagagtaagtcaaggtgttcatatttcctccaggtacaaaaaaggccgcccacgaggggcggccaggttgtcgcttacagccagcgggcgtcgaggttcacaccaagagccgtgagggtgtctgcggtagcggggctcaccttctggttgccgccatgttggaacgtggtgttggtcatggaaatgacccaatcacgggtgttcatctggttgctgaagccaccctgcgggatcactgcaatgtacgcctcgtccgagaagtacagggagcggcccgagttgtccttgatcagcatctcgaacatgccgtctgcggacatcgcttcacggtcaaactcgtgaaggaaggtaaggacatcgttcgactccgaggtctgggccaggcttacggtagcccgtgcgccggagttggcgttgaacacccgggtgtgagtgtcatcagcaccaacatactcggtgaacgtgtccaccaggcgttcaacggagacaatgctgtcttcgctgaagccggtcagggtgtggctgatacccgaagccgcgtggttgattacgatagtaacctggttaggggcgtaagtggaagtacggcctgccattgtctactccttaagccgtgactacgccacggataccgatgatgtggatggcaccagcgagctgagcttcgaactcgataccgtcatagaaccggcgagcccgatcattcggagacatactgtttgcatcccgtacacggacccggggagccggggtgtcggtgaacagttggactcgaatgccctcttggagctgtgctcgaacatccgtttcaaggatggtggtaccctgcttggtgtacgggattttcttgctgttccgctgacggaaccacaggcgctcccggaggcgagcttcaaaccagtcgatgcctaccatggtgtcgatccactcgccagacaccatgctaccgaacgtggtgctgttggcatccccaacgaactcgtaggtgttacccttgtggtcgtggatgtttgccgactcttggtcgtccagctcatcgtaggtagctccagcgatgcccttgaagctccaggtgttgctgcccggctgctcttgcagttggctcgacatccagcccagctccgggaagtcctggtcagctcgaccattccaaagcaggaaggtacgatggtagcctgccttgctcagggtttccaggatgttgccagcagtggcgttcttcacagccacggagctggtagaggtaccgaagattttcttcgcactcatcgactcgatggtagcagccacttccaggacatctgccgggacgtgagattcgatggtagcaccgtaccacttgctgttcgcagcgcttactgccaggatagcggcaccccagccctcggtggacggcatgttcgacttcgacaggtttgccgaggtagtcagcgaccaggaggtgctggagctgcgaacggtgatggtaccgtcggtattgtcggtcagagtgatgccaacgaccgggctgacgttgaaagctgctaccagtcctgcgcagatggttactgccgtgtctgccggctcgtcatcttcatccacaggttccggtttcgacaggtagctcaccggaataccgttcagggtcatggtgtaggtggtctgcggtgcgacctctacaatggagacagtggctcctggcacgttgcggcgaccgacaaccaggcggttggggcgcgggttctgtgcgaaggccatacgggctgcctgcattacggagctattgtccgggaagtctgccatgacagcttccgtcgatgcatattcccgcgcccgctcggagaagttggagtgggtagccaggaacatcggcacgttgaacgcagtggtggctaccggctgcgtttgccgatcaatggtgatctggatgatgtcggtaagacgggtcatcttcagggttcctcgttgagtgagatatggttcttgataacgtggtcaggctctcgtccggcgttggtgtaaaccgcgtccagctccaaagcttcgatccaggtcacctcttctttccgtgttatggcgtaggacagatggacatcgtaccggaaatgctggtacagctcattgggacgttgatccctgatccggcgaatcggattggcgccattctttgaaaacccgttggattccaaagcctggtaaccatcctcagtgctgaggaagaattccaaatgctggactgctgccgctgccatggcgtggttgtgtggactccccaggcctgtaaaacgggctttaagggtgtaccacttggtgacctcttgcacagccctctctgggtctgttgggtcaatctccagagtgcctgctacctgctcggtgaataccgatttgatgtccatcggctcgatgtacagtgcaggcgtctgggtctgttggttatcacagtagcttagcaccagagggaaatcccccaaagcagcctcagccacgttgtagagggcatcttccaactgggtgtaaatgtcctctatgccggggtatttcgccctcagctcgtccatggtcagggccatcaggtaccctccacacgaacacacatggctttgacgtgatccaggaccctcatgtcgtaggaagcggtcttcacgacttcgtacagctcgcccttccaccagaactggtccgcatcccagccatcctcagcctcgttggcttctcgcagggtggtgtggttcctggtataaaccttcaaagccttcttggtccgttcaccctcggggagttgcatcgtgtccgtgcttttcagcacaggctggaagcttccctcgacaatgtaaatctccggagggtcttgaacaggccgtcctcggaccaggcgcttcctgggccggcgaatcacctcgttcttgacgaagtgagtgcttagcatgggtggcgtgagcatcacttcctcctcacgatcttgtacttgacgctatcctgcatcttgcccgtatgggtcagggggtcgtcaaagcctttcacctgggcccagcgagcgctgttatggcctgggaagtcgtcaatgttgacctggataatctccaccatggttcggcccatcttgttgagctgccccttctgggtccgcccatctcgaatggtagcctctaccacctgcttcatggctttccggtagtagttcaccgtggcccagtcactaaagctgggagtcatgaagtctcgttccgggttggtttccgtgccgaaaacgttgtaggctgccacctgggcgactgggaggttaccattctctggaccgtaccggtcttcagggaagaagcctccttccagcgtcagaccgtccaaggcctccatccgggcaatcagagcgtctagcttccgaaagtcagcagagattcggctgggcatctagggccttcccgattctcggcatgtcgttgtaccctacgttctgctgctcgtaaagccgcaaatcacgattgaatccaatgaaaatcttccgtgccacgttgtctgggttggcattgttcatggccatgtctttggctgacacacctccaacgtagggcagagcaatcacggttgtcaggttcgggtccttcaagatatcctggagagtttgcctatagcccttccaccagtcacttccgtagacctcaatatcaccagtccgttccctgacgtaacgtgccagcttgaagaggattgaccgtacaacgtccaggaaagccctgcggatattgccattgtacatgtcgataaaatattggtaatcttcgtccgtcaagatttcaatgtcgtcccagatatcccccaccatcaggcggagctgatcgaccacattgttcttcggatcgcctgtgtagggcatatcctactccttttctcgggaccaaaaaagggggcccgaaggcccccgttttcttaggccgctttgcctttcacgaccagttgcgggtacatcaggacgttgatgaagttggtctcggagttaatctccaggaactcacctttcgggtccacgtactcgaacgcgtagctttcttcgccgggggtgttgacgtgttcgaacttgctcgccggagcgaagaaggtcttgaacaggtcttcggtgccgctaccggggatgaagacagcttcaccagccggaacgtaacggcgcttctcgccacccggacggccttggaagccaccacggtactcgatgtacagcacgttgccgaagtagaactcacggtaacgggcgtcgaagccacgggcacgcaggcgttcacggagaatctgcggctggctggcgtagtatttgtacgcctcaaccacggtcgggtggctgatcagcttgctgaagaactccggagagcagatagcgataacatcgccaactacgccgccagtgtaggcctcgtcctgcatgtgagcgtaaaccagctcgctcttctccaggatgttggtggtcggggtgtccagctcgaagttgacttcgaaacgggtcttaccgaactcttggtaccagtcgtaaccggtagcaccaccaacggtgttgttgggggtgtagggcttgccggtaaccagggtgtgcatacgagcaaactccatggtagcggcgtgagtgccacgcagacgctccagcttgcgcatacgaacctggtccagggtttccagctcttgcttgccgtaggcacgcttgccctggatgtcacgcggggtgatgtaatcgtcgtaggtgaagtgcggaaccgcgaaggtgcgcatttgacgatcatagtcacggccaacctggtggcgagcgccacgatggatatcttccatcagaccgaacgacttggtgatttcttccagagtcacagactcttgggtggtgcggtcaacaccgaagatgccgagctgttgggtcagaccccacacgttcgggatcaggatcatcggctcggtcaggtcggtgtattcgaagttgttctgaagcgagggaatcggtcgcatggttccttccttatacctggtgtacagcgaagatgttcttcttcgccagttctgcgaaagcggtttctttgtctgcggcttctacatcgtccgcaaagatcacaccttcgtcggcgatcttggcgtagccacgtgccagaagcaggacctgagtaaactggtcagcagcggcgcggtgctcgcaatcgatcaggatgtaggcagcgttggcagcggtcgccttggtgaccagcttgccgtcagcgtccagaaccgagccggtcgctttcacagccgggtccagccaggttttcggcatgacttcgcgggttacgccggaggccgggtcgtattcatacttgagccagttgctcaggcgctgatggtcggtagcgataacgggcatgatgggctcctataccttattgcttggtgtacttggccagcatcagagccttgagggtctctacctggctagcgttttcagcgtcagatgcaccgctcagaccgacttcacggtccagaccagccggaacttcttttgctttggtgatgtgcttgagaacgacagcgaagctttcatcgctcaggctttccatggctttcatcagctcaacctgagcttcagcgtcagcaccggaaccggctacagcggccttacgagcttctaccttagcggccttctggatggcttccatggcggcgatttgttcggtagcagccttcagcaggtcggcttgcttcttgagttcatcttgcagctttgcttcggctgcctgtacagctttgtcgatgagttcttgactcacagggctttcctctttgttggtgtggtcggccccagaagcggtggccatatggggttccagcaggtcacgagctttcgcgatgctgacgattgccgcgtcgtcaagcttattcaagccggcaacggggtcctcgctcttgtacagggacttcagaatctcgatgccacctacgcggcgttcgatgtactcttggtacgactctccgtccatctgccaatctttcccttcagtggtgccgtaccccagggcagcagacaacatctctgcatcgctgtagtacatgttgaagaacttccggaggaactccgggaactccagctccactttgaccttggtggctttcagcacgtcttgcgggattcccgcgtcaagtgccttggttaccagggtcgtatacccattcgcagggccaccttgtcccttatggaccagcgccagatgagcgccttcatggtcaaaagagatgtcggtcagccggcgtttggcttttcgatcactcatcggtgaggtcctctacagttgctcgggcgccgatactgacgccgttgaacgatccatccagcacccctgcccacaggtcatctgccagcgcatcaccttccgggaagtgcatccaagcgcaccacgtccctttggtaatggtccgtccatcgtcggtgtcgaagtcggccaggttgatgaagctttgctcaatctgggcagcctcggtctcgacggcgtggaacaggttggctttcatgcagtgccggttgaactgaatgcatgccttctccacctcgactgcggagtagatgtccccgtgaaggtccacctcatccggagccaggacgacaaagagtgcccggcgctcggccttgtcaacactcttcaccacgtcctctttgggagtcggctggttttcttcagccatttcagttatcctggtttgcggttgaatcatcgcgggcgctggggctcttagaagtcccttcacccgccgtcttcatcccctcccctgccttgctgtcgtttgccaagggcagagcctctcggtcgatagcttgagtggcaggaagttccggtaggccaatggccttgcggtttcggttggccacatcacgagtaaactctaggccaccaacggacatcattcgctggatcgccttggagtaaacatccaagtcaatctcgtcgaggtcgccgaactcgaaggtggggaactcttcatcggggcgatatccgtttaaccggaacagttgaggtaccaggtcgttgttcagcacgtcccggatcatctgcaaacgtgcttcaatggccatagccatcaggttggtcttagcaccagccaggctgtaggagccaacgttgtcctggcccatcttcagaacatctgcgaacaggacctggagaatcttgttatcccaacgcttgatgattgcgtcggtatcgtacatcttaccgccctggctgctagtcagctcgaacttgaacagcgggaggcgagcttccgggtcaaactgctgcggaagaatgagcgacgtttgctcattcatggtgatgttccgcatggcgttcttgtaatactcgtagatcgccttctcttcgtcggaagcgtccggggacatgtaccgaggcgggatgtacagggtaggcataccattcatatctctggtaatgcctacggcttcctgctcttccagggcagtccggtaactccaggcgaagtatacgtttttcagagggctattgccctcggggttgtcacggcgagggtcgatacggaagttcaggaacttctctttcgggatgaaaatctcatcaccaccgttgggcaggttcttcagataggttccataccgctgctcccatccactgatcagtttgggagactgcacagcaccgaggaagtccctaccatcctcgctgaaccgccacttcctgatggtctcctgagaacggacagggagacgcttcaggccaatcttgttgtcattgtacttggagccatttgcccacgtccgtttccggtacaccttctcatggatcgagaagccgtaagtgaagcaactggtcacctctttgatgaagtcgtaccatgtgtggtccatatcgtgcatgacctgggagaggaatttaaccttctcctgcatggcagcgtcaggctctgtaccgcccttgacactccattctacacggcttaccatcaattcgaacaatgccagggcacttgcaatggtggcgtctcgggccatcaccttgaaggtgttcaggttctcggggaaccgtagctcagcccgagtttcctcgtagattgcaccaccgctttgctttaggcccgtgtgtccgatttcgcccagccgaaggcggggggccgatggcacttctgccgcctttctgacgttcctctttctccgagccacaaagggcctcctatcgttcaatggccagcgggtttggtcgggtcaggtccggagggatgaagttgggaatgtggatgtcggatgccaaataagtgtaggcgtccgaggtggcatccacctggtcgtccttaacattccggcttccatcaaacacctccagctccgtcaggtaagcctcgttccaggggccttctactacctgaacacctccagcctctgccatactggcaaaaggaccgaaccgggtgacctttgatttgttggttggacgggtcctggcatggaacccgtgctctgccaggcggcgaacaaagtcccatgcaaggtgctgtcctgccgctcctggatcacgtggaatcaggatcgtagtgtcagctccgtcatgtcttgctgtctcaaggatcagttcaaaaaccccaccaatacggcggcggtccctcaccacatcctcgattgtgtatagcgtgctacggcccttgctcatcaatacgcccgctgtccagtctggctctttgttggagtctgacggaagcgtaccgctgatatcccaggctcttacctgtcgcacggtatccgtaggcctaagcggaatgattggagtccattctcgcttgaagtagccgcttgcctcttctcgggcaaaccagctaccatggagcagtcgaagtttctcgaccctgttcaaaccttcaagccaggcaacgtactgggggttgatctccatcacgacagggttgtcgtagacgtttgccgaaatgaacttgaaagtcaggggaggagacttcagattgtacttttcaatcagctcttccgctgtgtcagcgaactccatgtctccgttttggatagtgaagaaccgagtgattccgtccctttctgggagcgggatacctgtctcagggtccaggtaccaagtcagccacttacgcagcggactgttataatcggggttgcaggtgatcttcatgtgaggttcaacctctggacacttcggaccccgcatacgagacatcaagtaaagcaacatttccagggtgtattgctgtccttcgtcaacgagaaattcgttgatttccagaccctggtagttgtccttatcgtcgatgtgggcaaagtgtcgaaggtgaatctcagctcccgaggagaagacgaatttcccgtccttatccttccatttgacattcttgtcaaactgcttgtacaactgaaggcagttatccaagataccgccagggcccttaatctgaggagtggtccgtcgagtgatcaggccccggaacatcgggtgcttcacatgctttagaaagtccatcactccgaggtaggatttaccagccccggcagctccaccgaacacggtgatgttcgcagtggagttgataaacgcttcctgcttcggagacttaggaccgatgactgtcttagtcatttgtcaagccctcaaagtttctcttgcttatatggtcagtatatgctaggggcttaactttgtcaagcccccagtccctgtttatgcctttagggcagctaacagttcgttaagcttggcagtgacggctgccaactcggcgtcttcggccactgctgcgacggaattcaccttagccttaacacccgcagaaacggctgcgtcgcctccggtgacatcctcccaggcaggtttccagttgcctgctttagcagtgcttgcactggtaccgatagccaggttcgaggttcctgctccaatagcagttcgtgcagtagcagcatccgcagctttcatcactgccttaccagtggctccagcgccttccagggtatctacggtcggtgccggtgcaggctccccaccgtcccctgccttcatcaggcctgcctggatagctcccaggacgccgattcgagcgattgcatcgtagaggaccttatcctctggggtcatttcataagccatggtaggctccttgttgcattgcccggggccaatccctgggcacaaaaaagccccgctatgcggggctattcgtcacccccagtagccagtcatctgaacacttaaaggtgatgcgagggttttcagatgagattcgtactcggggtagagttctttcacaaccgggtgaacgtccggctggaagtacagggtgtacgggatgaggttggcttcttctggctcttgccctgtgtggcattccaagaggtctatcagagactccgggttctttgcgacaaccggcaaccctcgtaaaaaggtgagccatcttgtctgaccactcttcttgggatcaatcctccctaccccgccgtgtcctcgtgcgctatcctctttttcaatgaagggtcgcacaagggcgtctaggaatgtgctggaatagtctccgtgagagaatgtcatcaaaacctggggagttacctcaggacactgtaggttcctgagtctgctcagcaggtaagtcagagcgctgctgtctacctggttggcttcgtcaaccgctgccctttgaaatacgaatcctcccaggcttctaggggcttcctcgtttgagatgcctcgaagaactatggaggacctgcgatctggagtccttaccatcaaatctcttcgaaagaaccgtagagttgggtcaacatccactatctgttgcgccaggcctccagggcccgtaagatatggaatggttctccgggctgccaagcctcgatatccttccaagtgcatgggttcggtgagccacttggctacgaggtgggacttacctccgcctgcgtgggaggcgtacaggatgatactgtgcttatcgtcagacatcacgcttgcttgtgcgggagtgaattggaacgtcatttgcaacctccattacgggttgagaaagtaaaaagccccagcgaagatcgccggggctaagggtcacttctgagtcgctgacccggagcgacaagacccgattagcatcgggtagattggcagacgtggtgggattcgaacccacaaatgctggagtcaaagtccagtgcgttaaaccttttcgccacacgcctgattgtaagtgagaggttttggaaaaacgggctactacctctcaagcctagcctagctgaactgcctgtagcagttttgggactgtgttgaggaatcgaacctcctgttgctcagcggtgggagccctctatccccacgttaccggcttacgatccggggagcctatcgcttcactgcaacagtccaacttacacagcatttggtggagggggctggatttgaaccagcgatgcccggtcggacgccggatttacagtccggtgcattaaaccgctctgccacccctccgttgaaactaacctcctggtgcgcagtgccaggccttatgcgtggaggttactcttttggctccgctccctggaatcgaaccaggcacgtcttgattaacagtcaagctccctcgccttgagggaccgaacggaatgtaggagggtcacttggaccctggccccgcaggaactacccttgctgtcgggctatgaaattagcgggttggtaacccggacccgtccgggagatgctggatcacctcctctgcacatcagcttcgtcggtcccacatctgaatctcttaaatccactttaccacatttttagataaagtcaagagatttttggcgggcagtctcagattcgaactgagctgggttgaatttggagtccaacctggtcgccaagacccctaccctaaaacctcacgtttgacagaaccatcccttccttcaggattgtgtagatcgtcgagtcatcgtgaacgaatacgaagttccgaaccttggaaacccttacgaccctgccgtgctttacgcagagcgcgttatagtttcctatccgcatacgaagctcaaaatcacagtatttcgcttcagcgaaaagcttccggatgacgtagatgtctctaccgtcctcgaagaccgaagggtggaactggagccggaaccgctcacgaaagcgcttcctggcatggggcgtaacgaacatgtttctcatggtacctcctgtttactcgtggagggtattaaaccgtgttcagtacgccgtgtcaagagtgccggtggactcccatcctcaaaggtccggctgacacttctccaggactttagagcctgaaggacctaccccggcaacctccggggcatagggggttcgtgtggtgaaccttcaacccctcccgccatacggctccgggaacgcctagtggggctgggaggcccctacaccacaagagccgaggacatagccctcaatctcatggatactttgctcagccagccaaagctctcggtactccggagagcctggaaccttgaggcccatcttacggcttaggctgatcctgtgattcaccaggtcttccagggtttggcagtcagccagaactgattccacatacacccttgactccgggaacacccggtccattacttctactgggacttgcatgctatgctcctctcttggcaggcatagtgagcgagaattctacgacctgggcctgaggttcatcctcctgctcaggaacaccgtcagacttgttctttactgcgtcaatggacgcctgtgccctgagggctgccaggtaggcagcgaacaccttgtcagccatcttgagacgtactggagatgtctgggacgcattggtcatttcgtcgatcatgagctgaatagccttggcactggcaggcttcagctttttgaggatgtgatcaagctctccggcagacatcgccttgagggcctgagcttccttggtgggccgaccacgagggttgccactctggccctttacgaacttgctcatacttactccttggttgggtgcctgagaggggaaggaggaggaaccctcccaggtcttaaactggtgtatctatagatactatagcatcctgtaggtgtgtttgtcaatccctagtcacattgacggactggtgtcaagccctgcttcgcatgagggaatgcgtagttctcagtagggcctaccatcttggcacggccttgacacagggagcagaggtcttcatgcttacctgatactgaattcttactaggatacttaattatcctattacagcctttacatctcataaaaattaacctatagtaattaatattaattatatacttagtacaagggagggggcacttgcccactccctcccttgtatattatatataatatatttaataatattactataaattctttagcttgtcaagccttgacttctgcttcagatggtggtatagtgtactctcaatcccaaggaggaatcaaaatgtccgtaaaacctgcttatccagcggatcgtaagcgtatccgtgtagtcgaacaaaaccccatcagcttcctgcaagccgtggaagatgccatcgctgaaggctaccgtgttgagaacaccatggctggattcccagtggtcagctctgcttcgggtgttcgtaccatcaccctcttccacgaggaagtgtgtggcccgactgaagtcgccagcccggaggccgtaaagagtctctctgagaacgccgttgaggtcaaagactacaacctcatgaatttcctgcttgcattccaatcccaggttctggcaggatacaccctggacacctcccgtgtgtccatgttgtccagtagcctgcactgggctgtcctggagaaggggcaagatgagaacgttgtgttcgacttcggctcttccgagcccgaagctgaagctgagtcacaacctgaagccgagccccaggctactgagaaaccggcccgtaaaaagcggcagccaaagccgaaacctaagcagcaggatgatgctgagcaagaacaaattgaaaaaggagagaatgaatgactgagaaagcaactcaactgaaccgccaggacctgttcaagcaaatggcacatgacgccctcatgagtgttctcgtaccgattatgccggacgaagatactctggatcgactgtaccaggctgtgcaggtggtcaacctcgaacccctggccaaagagttcgaccgagtgatgacggcagatggcaccgattggaagaaaatccgcaaggtggactccttcctgcgttccaaggactacatggaagtgaatggccgctacgccgtggtgcaagccgagctacaggaccaggtaggcctgatgctccaggctctgtacagcgttgtagtgccggaagagaaacgccccaagcaagaggagaccgctgaagtctccgaagaagcagtggaaagctgataacctaagcccgcccagtgtggcgggcttttttgcgcctgaaataagttgacattgcaggtgcattgggttaggatgcccctgcaaagtaatcccgcaaggagtagacatgagcagtaccccaagaactaccgtggtgaccttccaggacttctcggcgttggacttcgcaccgccagctacctggtacatccagaacgctatgggtgattatgtattcgtacacacccgagataggatgaaggcccagacgttcgtagacgaagagtacggaaaggggcggtacactgtgaaggccagcaagatgcagcaggccaaaggagacctcacctgccgggggacagcaaccagaaaaggccaacgcaagccatcctaggaggtgttatgaagacaatgattgtggtggagaaactgaacaacgggctcacggtttaccgcccaaaggtcaagatgtatcaaccacttctggatcgcctattatcctggcatccgaacaaatggcgggactgccaccttatctggccaaacaccgtgagaaaggctgaggtgtgggttatggaccctaccgacccagacgtacatattcccgagggacacctagaaaaagctatcattgctcagcaggagatttacgaaggagcagtcgcacttaaaagtcggtgcccaaatatcgaagacctgacagggatggacctgtcaaaatcctttgctgagctggttctggacatgtgcatcgactcgtacaacgccatcaacggtgtacaggttaaaaaccggtatgtgttggaatacccagagaaaagccaggggtactccctgtgaagcagaagcataaagaggctttcatgcgctgcgccgagtccttcgctgagtgctctgtaggtgttcgtgcgaaggttggtgcagtgattgtccagggaaacaagatcatcagtcaggggtacaacggcctcccaagcggcctggaaggccctctggagaacgaggagggggttaccaggcccgaggtacggcacgccgagaaaaacgctctactatggctctcatgcagccaggagagtgctcagggtgcctggatgttcgccaccatgtccccgtgtgaatactgcgctcacgacattgttgacgcaggcatcaagagggtgtactatcgccaccagtaccgactgacggcaggcattgattacctgctgaagaacggggttgaagtcatccacatgccaaaaggagattaaacatgtacgcacaagactgtaagaaacgcgaacgggtgttgcttgagctatcttacgaagagacaaagatgcttgcagctcttgtaggcaaggtatccgcagtggcggcaacaactcccctgggagccttcatggatgagctgtatctgactactgtgcatgttgctgagcagcatggaagcaacccatatgaagagcagtttggagtacaagcgctcggcgaggtggatgagtttgccattctggtaaaaagctcagacggtgaatttcgttaataaggagggtttatgcaaaaagtgacaatgtaccaaaaggataagggcggtaacttcaagcagtggagctgctggagtgaaggtgacaaggtattcgtggagcatggaaaggagggtggaaagctgactgtcaaggtgaccacctccaagccgaagaacgtaggccgtgcaaacgagaccactggcgagcagcaggcccatctggaagccacttccaaggttgagaagcaattcaaggcaggttaccgagaagataagagtgatctggaccatgttcctatccttcctatgctggcagaggattacctgaagcgctccaagtccatcaccttccccgccatctacagccccaagatggatggtgtccgatgcctggctcttcgacatgaagatgggcgtgtggagcttcgtagtcggggcggggagcagtacatcctgccacacgttgccgaggctctggcccagatcatggagattggagacatttttgatggtgagatttacctgcacggtgagtccctggaagacatccagtcggcagttaagcgtactgacaccttgaaagaggtggagaaagctgagaagaagcttatgaagtacgaggacgacgagttttccgatgattttgaactccaggaagccaaagacgccttggacctggcaatccacatcgctgctctgcgtccggcgttgcaataccacatcttcgatgtagtgagctgtaaagcgttgggtgttaccgttgatacccaattctcttggcgtctagacgcacttcgtcgaattgtctatagcgcagaccttatggggaaccccaccctgtttgtagtggatcaggacgtaatcttcttccgggaggatgtagacaagtaccacgataaggtggtcatggaagggtacgaaggcatcatgcttcggaacatgacggggctttacgaagcatcccagcgatcttccgacctccagaagtacaagaaattcctggacgaggagttcgaggttgttgacgtggtggaaggcaaagacgggaacgcagttctccgcgtcttctgccccaaagtgaaggagaaagcagacggtcgtggacaatacgccacgggaattttcgatacaaccttcggagatcatgcggctcgccgggatcaactggccaatccggagaaatacatcgggcgttacctgaaggtgaaataccaaggccgtttcaagaagaccctggttccccagttcccagtcggcctgtgctggcgggaaatggacgaaaacggcaatcccgtagactaaggttgacaaccccaaggaggccaggcatactggcctccagttcacagaaggagtttactatgaaaatgctgttgcgattcacccatcgtacaactttcgactcggcgaccgccaagaacactgcatggcttcaaatggacagcctgatccgtttcatgggcagcctgggctatggtttcctggcagagtcgggcagcttctatacgagcattcccgagttgaagagcaagggcctacaaacactgtctttccagaccgcagtcgatcttcacaacgagccgaagagcttgtggctggaaactggtcgaggcagcggcaccttggcccctgctaatcccaaactgaaaggcctggagctgaccccttacggcttccagttgagccaggctacgaagatcgtcaaacgagtgttcctgactcggactcggaagagcaagcaagcaaacttcgtcatcttctgctataagcatgaagtgaagttctgccaagaaaacttcagccgggaattcctgagtaccgccttccctgtgttccggaacggcctggcctcgttcctgtaatccgtgccggcgcaatgccggcataccacccacctgatagaaaggagcccgaatgaagaccctagaagcgctctgtctgagcactctattggccgcgtccggactactgttcgagatcatggtaggcattgagacttctcgcttccatcttcttgagaaacgagcggtcctcagcagtcaacctctggatgaagtccagaaaagagaaacctacaaggtattgtgcgagcgtcagaagtcctgtagaaccctggcagaggcgatctacttcgaagcccggagcgagagctggaaagggaaggaaggtgtagcgcacgtcatcatcaacagggtgaacaacccagacagatggccttcaacagttccaggagtggtgtacttccgttgccagttctcgtacacttgtgatggaagccgaaaggaaggaatccaagagaaggtgcagtgggatcaatctaaggtagtggcctggagggctttaaaaggtctgtccaaagaccccacgggaggtgctgatcactacctgaaccctgcgaaggtcaaatatatgccccgctggacgaaaaccatgaaaaagacgctcagaatcgagcggcacgtgtactacaaatcataaggaggaagtatggaactggtaatcgaagccaagaaggtcgaggttgaagcaacgtacaatccgtattccggacctgaagtgactgtcgagatgtcaggtgtaaagtctacggtcgatgctcttctggatcaactgggtgatgatgatatcttggattacgtcatctccaatgtccatccccgggacattttgggggagatggaggtatacgacatcacgtccttcctggaatctaaagggttcgaggtaaccacatgagtctgttctacacaggtgtagggtcacgggagactcctgggtatattcttgacatcatggtcaagctagggtactacctatccgccgctgggattaccctccgtacaggtggagccccaggggcagaccaagcctttgaagaggggtggtggaagcatcagatatgggatggagatggtacttccaatggccgaatctacataccgtggaatggcttctatgacaggcttcaccatggagatgcctttggtgctgtagtctccctgtctcatatcccctacgatctgggagtcagagcccagcagattgcccagcagttccatcctgcctgggaacacctcagcccgggggcaaagaagctccacactaggaatgtcttccaggtgctgggggatgatctggagactcccagtgaattcctaatatgcttcgctatcccgaacaaggacgggagcgtccagggaggcacaaacacagccgtcaagctggctaaggcgcacggcgttcgggtgacgaaccttcacaacgaggaatcgagaggttgggcaacagaatggatcaagagaatggaggaccgatacgggactattcccgaatagaagcccgggcaaatgagctgattaagcgggctaatcggctcagggctgacaaagaacgcaaggggaacaagaaggggcgccagttggaaaaccaactgatgcccttgttctcgttcatcgcgtttgagagggatgatccctggccgttggagatggacaacatcttccacggggttgccaacctggattggtaccggtccagcgccgggggtaaggagggtgtgagcgggacgacaggcaactacagacaggtgcctctgtcgaaatcggctctgcgtaaaatatttaccttcctccccttgatttccacagaggaagtccgtaaactgctcctcatcgacgacaggcaagccagtcggtacatgaaggcggccttgttggcataccccaagctttgtgaatttaaggagaatttttatgagtttcaccccgaccagtgagcagtgggacatcatggaagctgccgaagaactggcagcagagcaacgtccgaatcgccgcctgaaaatcaatgcaggggccggtgcagcgaagaccaccaccatgagcctggtctctcaacgcctccaggttacctccctgtacctggccttcaacaagtccatggcagaagaggccaagaacaagttcccgcagtgggtggtaaagaagacgacccacggcctggcatacggggtgttcggggccaagctcagtgagaaacttcgccgccctaaagggggatacgtcaacgtcctggggaccggggcagagattgcccgctacttcaagatcgccagcatggaatcggacatgggggtcaccgtcacggcttccagcattggccaggcgatccgcgatacggtgaacagattcgagtattcggcagacgaggagcttgaggtcaagcacatcagctacatgcccctggcaaagctttccgagaaggaccgtgtagaccttccctactatgaggccctggttctccgctatgcaaaggccttgtggaagaagcgtattgacccgaacgagcagacgctgatcaaccacgacacctacctgaagctgtaccagctctccaagcctgacctcagccagtacaaggtgatctatctggacgaggcccaagacaccaacgattgcgtcctggacatcgttcttcgtcagcaggactccctgctggtcatggtcggtgaccctcggcagcagatttacagcttccgtggcagcgtgaacgctatggccaagattaaggccccagagtgcaagctcaccaccagcttccgtttcggtgagaaggtggctgaagtggcgaacatcatcctacagaacagcaaagcccaagcccttcacgggtgggaaaagctggaatcgaaggtatgggagagcaacggcttcctggcggacggtgacgccgaaggggtgcctgaaattccggagcagcatgcccggctctatcggaccaacgctgccttggtgtgggatgctgtaaacctgattggccaaggcaagagtgtccgactggagattgacacccgagactttatccgtctgttggagagtgctaccgccctgtaccagggtgacgagaagaaggtgaagcacgaaaacatactgtgctacacttcttggcaagagttccgggacgaatacgcagagagcccgggcgaactgggcagggtgtgccggatcatcgaaggggatgaccagtggaagattttcaaggccctccgtgaccatgagaatgatccctcggcagacatcgtactgacgactgcacacaagtccaaaggtcgggagtttgatgtggttgtcctggctgacgactatccgagtgggtatgatgacaagaagcggtgggtaggtttgaacgagatggagcagaatctcctgtacgttgctgccacccgctgcaagaagcacctatacgggaatacaaccctggacaatatcatggtggaaacccgtgccatgtggcttgaagcgaaggagggagaatgaagcaggtgaatttcgaggaggcaatctcaaacctggagcgtgggatcagtgtcgtgctgtacttgaaaggggtggaagggttcgatgatgacctgatttaccgtacatacctcttcaagggaggtttcggtcatgtgaaagattcctactctgacggtacttcgatgaccgcactggttccattagatggacccgaacggacggagctggttctgaaagattgccttatctgggacctgtcctcagcccactcggtaagctataatgggatttgactggcaaaaagtacccttacaccttcgagaggtgttgtgggaaaatgaaatacaaaacggaatggtagacgaagtagactgtgcgggggattgcggcaggtcagggtatcccaactacttcggacactgccaggaaggtgaattctactgcgggggctctccccgctgctgcccataggaggaatcatgaaaaagatgtccaaaatggaacaactgaagcttcactttcaagcgcccttcaaccgggaggacttggcatgcctcggagctgaagtctgggatgctgctgttcttctggcttggtggactgcccgggtggtcatcctcgttgggctgctgcctgtcagctacccgctcattcgtctgtacctgaagaaggtaggacgcgcatgaccaccatcgcttacaaggatgggatcattgcaaccgatggaaggatcacccagggaggggtaatcaccgacgaggacgctgaaaaacggctagaagtggatggcattgttttctggctgtcaggggcggtatgcgactggaaagttctcgctgaggcttatgtgaacggcgacggaatggaagaccaggagctgaaggtttccggtctggttctcgatggagatggtctgcactttatctcctgggacggcggcatctactccgaaaaggtgaaccttgaaaggccacgggctgctgggtcaggaactcagttcgccctgggagccatgatggcaggggccagcgctgaggaggctgttgaggcagcaaaggcactggatatttactcgggcgggacagtgaggtcgtataagctatgggactagccgtgacggagttgaagctgaacaacctggaagaggcgtttcatggtctagcttacgtctcctatttggaagttatgaccgaccctggaaacggttttggaagtgtccaggtaagtagggtgctgactgtggagcagtacgactgcctggtaggcaagcttccaaaacgtccaaaagcgtgccaggtgctggaacacgagaaccgtcgcaagaggctcaacaagagaatcttgaatgagatggtctaccagtgtacgatggaatttcagaaagtcttgacggacgacgttgaggctgaagcccgtgaaagaggagagatactatgaaaagccgaccgatcaccctcatcctggagcaagatactgtccggggcatgaaagtcttctgccagcggcaatttactggcgacgagggctacctaaaggaagccatgtatagcttcctgaaagagaaggctgggcagtacgatgattggacccttcagggtcatcccagcactatccagctccggactgaactggtgacctacctggttaacaacggggtatgacatgagcactctgaccgtagacctgtacaccgatcatgcagacggccctcagtttgagccttcctggatagttctgtcgggaaatctcaagcgagataccctcaagctgttcaacctggtttcggacagggctgcacggctgggtcctgcaagctatgtacatctgagccacctggacagtcatgccaaccgaaacaaagaggtccgcacctacctggacgctctgcaacaagatgttctttccatccaccttcaggagacccaaatgagcaacaaacatgaccctttcactgtcagtgtcacttccatacacggtggtggtgtgggctggaaaatcaacggtgtgatcacctgtacccgagagatggacaaagatatggctgtcctgttcgaggagctggagcggcgccgctaccttcctcagcctgacaccaaagaaaccccggaggaaggttacccggcaaaccaggtactgctctctcccatggaaactcagaacggcttccagcgccttcacatcgccgagatggaacgtcaagccaatgtactcctcacccaagccaaggagaccgaatgaaaaaggaaaaagggttcaccctgacagaagcgatgatagtcctggcaatcctgggtattctggcgtcaatcctggttgacggtaagtcttcctgggatgaggcccggttccaggaagctcaggagaagcagatgctagaaagaaaagcccagggtgagacgaggtggaacgaatgagaattgtcgtcaattacgtgtggagtcgttggactcccgaagggaatgagtatgaaggggcctcagcggaattcgaggtgtacagttacgctcccgcgtgtgaaatcgtctccatcgtggtcccaacggtagtacgaaaggtccctggagcttgcctaatcgacgatgtgaaggtagaggcaacattccccgtcgaggggcacgaagaccccctgagagcgaaggacatcgaggtagccctggaaagactcatcaagtgggagcttccgttttgaaggctgaatgcggcattttagcaggagaagacgaaatcttgggaacccgctgcctggatggaggccgctgtcatcacaggtgtgagactagctgtttccggcaggaatgctgcgttcctctcacggtttccctgttgaaagatgactggaccatgcctgaggagtatcttcccaaagggagtaagggataacaccaggcaggatgcctaatgaatgaaaccccgctggcgaaagttggcggggttttcttttgcaggaaagaaagatggagggcaggggtttgaaatacgaagcttacataatgtacgaaggaggagaggcgtggatgtgtacaggttcaatagaagtcttctcaaagcgcttgcagcggggctacagactgtacggagtgagtgagatagaggatcaaaggaggctgaaaaagggcaataaaaaaggcagctaaatagctgcctttggaggttacttcgctagcatagaggctatgcggtgtagacgttttgcctgggaggggtgaacactacgggttaactggttggaaagtgtggccaggtgatgatacgtttttcttcgggagttcagcattcgactttcctgtcggttaaggtctgggtgatgaactacgatctggttgagaagaagtggactgcatttccgaaggttggggaaatagccccctaccatgactaaaacgtccgcgaccaaatctgcccgaatatcgtccatgaacgggaagattctttggatgtttcggatagcagtttcagtttgtttcattggtcacctcctcggattcaatccattggattgcttcatcagtattgttgaatagcttgtaggagccagaagccaagtcaacccatttgggacgcttctcatcgaccacctttacccgaaccttatctccttgacgttggaggactttaaccccacacagaaggccagtgtactttgccaggatcattcctttctcactcatcgcgttgcctccaatttccaaacaagactggtagaaccttcaaccttctccctgtgaatagagataatccaacccaggtcagtaagaacttttgcccggctggcagcccccgaccaagagtagtaagtctcagagaattttttcatgtaccctcctatctgcttgatgttcatatcttacttggaaattccaagcatccttcacaaatacagcatcatctgcatttttccaccgacactggatgtagtaaacgtcaacatcccacttgtcggtaccgtaccgctcaaccttcaaaatctcaacctcaaacccttcgcaacttacccatatttcacccgggaagaaagctggaccatcggggctgtgaaattttctagaaccgttcataccacctcctgtttgttgaaagaaagatacgacaaagccccagacctgtcaaggcccggggctttaagtagaggtgaaaagagtcaccagctccctacaagctcctgcaaaggagtgtcgtatcccagcataagggggtgctttggttggtcacactgggtgagcccgaagcacatgacgggcttaccagagcggagcatccactgaagaagttgaggagggcacccacgaaggtgcttgggcagctttgacaggctcccccagcacggcaccaggatgtcagcttcggccaggatggactggaagtaatccacgcttttaggtccaaacgggtcgtccacttttcgcagctctttcacgtcggtggcccgatagcagaagacgttccccacaatgaacctatggcctccatttctctcggtgaagcctctccactttcggacggtagcatcgtctgtactggcatccgccgtgctggggttaacaccgaagtaggcgtacaccttgctaccctcaaagggtggcgaacagtctcgatccaggcggtaccgatatttaccgcactcactgatgattgctgacatcattacctccctcttgctcgctcaccatgaggctgctgaggcgctcctgctcgtcgatacaggagttccaaatttctcgtgcatgatggtaactgacttcaccggcgtaaccaatctctcgcaacatgttgccgatactgtcgccgttcgtgagacgggccggagcaaccccaaccctttcgcgcagggccaagacttcatccctgagtcttccaatctcgtccaggagggcgaggagggtcttggggttggctgctgcgcagaattgagcgttagctttatcctggtccaggtcggagtagaaaccttcgtttccgatcactgtctctccgccctctgcataaattaccgggaagaggttcgcccatgctgcgtcatccccttcctcccacacggcatgccactccccaggagttgccgccttagccagcctcctcagctttgcgtgatcggtcataacttggtctccgtaggtggagtcaaaggtccgacgaataccccgacacgctccctggacgtgtctaaaggatgccaacagattatctgccagttctcttgcttctctgggctagtgctcagatattctggcaaccaccagtagtagccaggctctaccatctgttcgggtctgaggtattgattagccatgttccacctcgattccggctttctggagggcttgaatgatccggtcagttgcatagcagtaaccggtatcgaaattgtctcggcaggagtttggccagtctcgctggcagtcctctatcccgtcgtccggcaactgtacctttagagcctctcggctggcttgccaggcatgccacatcgacgtgtagcgagcagcgactccggcaagaataacgtacaagttgacgttatcggtcttcacggggaagtaatcggtattacgccattcaatgccctcaggaatcgggaagcggttttcaaactgttctctcatgtcagtcatcatcagactccttcttacgatagcctgcgtcatgcagggcctctgccagcatgtaatcatttccatcaccagcatcacggatgacgttagccaactcaataatgtccttacgacgctgttcgtcggcaatctgctcgggcgtgcgcagagggcggaaacgttgggcccagtacagatttccttcggcttcgacaggtgcgtcgacccagaagaacgcgaccgacaaaccgttgtcgtggtgcttcagtatctcggcctttaccggctttcctgagttgatgtcttcgtggattgcctcgcaaaccgtcccaacgggaggcaggccctggccgtcccaagtcttctgcggtaggggctggaatgtttccagccgagacgggtcaccgagataagagggattccaagtctgagtcttgttgctccaccaaaaccaggaggaaccctctttcttcatccatcctccgacaaatttctgacttgttggctcccagtgcgttgcacccttaggtgccttactccaatcaatgttcattcttaatcctccttacgagtggatggtccgacagataagccaactataccttaggcctgaggttcttgcaataggggcagacccacccgtgacggaaccttacccaccccagggaccgggcttcctcctccaggtgtctgtacgtgttaatcactccttcccttgtttcaggagcttctcccattggtccttcattttcgtgagaccaacacctgtgcgggaaatagccgtgaccttcggaccactcctcggaccggtcctcacacctaacttccatccagattcccattacaccacctccttgccgggcgcggcggcgattagtttgaattcctccgcgtactcgtcgcagcaacactcgacaacgttcgtctcgcccaccggctcgcagttgcagaacttgctgcacagcgcttcgaacaggaagtcgggcatctcattgatcacctgctctcggcttaccgttaccgtgtggcactcgccattagggtggcgatactcgaagctgaactcccccggcacgctgtgctgagcctgggccacaggggctgtgtagagcggagtaaggaattcatacggcggctcttcttcccagttcgacgggtggtccaggcctatgtaaatgtggctgccatcaggccgacactggtccaacaaaggctccaactctttcttgtgggcgtagcctacgatctgcgggtgttgtgtgtagtcagggtctggcttctccagttctgcgaccctggccagggcggcatctaactgttgttggcgctcgacacatagcacatagtagttgtcggaaatggttttgatgcgctcaacttcagccaaggcggcgtcgcgctcgttgatgcacgtagtgaaagcgcggtccatctgctgacgttcgaatcggagagcctcgacgatgcgctcatgctgggcaagggtcatcaggggttccttactggttacggtgtatccgaagaagtcttcccggagtgataaacacgtcccgccttcggcatccgccgcctgataggccaccacctctggtcgatctacctccgcctgttctggcagcacgttgcgaatcttcagcccgatgtaaggagaactatagacaattcccgtgtttttagcgacgcatacgagagcactcttgtactcgatgacatctgcgcctatccatttcacaggctcgccgttcgcagtttccagcggccttgaaaagtccagttccggcgccggggtgatcggcggagagggttgcgacagggcggcgcggtcttgatcgctcacgaacttgcagaacgggtggtgctcgccgagtgacttgcatgcggcctggccgcactcccgctcatccccgcctgcctgttcacggcagggtttcttcagggcttcacgcttataagagggccaagtatccacctcgtcggcgcactcatccaggtgttggcggaatttagaacgcttcggcagggcggcacgggccatccagcctttcttgttttccattacggcggggttgctttcgttcaactcgtagccctcttcaacctcgtactcctcattggcccatgccaggaaatcttcctgctcggttaggcaatcacaggggatgaagataggctcaccccaagggtgaacacctccagaatccgcgtgaccagagcctccgcacttcgggcaagctgcttcggtggtcccattacggttttccatcattcaacactcctcatgccagagagaacggtgtctcggtcttcacaccacagcttcaggacatcctgagggatgctgggacggatttcactcagcagcttgtatgccttgctgaggtcctcttccagggttttcaccttcttgttcagcgtgcgtatgacctcaccggcgtaggtggtgtctgctacctcttcgtcctcgcagtataccaccatacccgtcatgtccccaaggtccaggtggccggcacactggtagcacaaggttggggagtggtaacccaccttgtcttctagcaggtggatggcctcttgaacactgttggcctcaacagataaagagcctgccagactggcatcgaacagcacagaagcttcataagttttcattaaaatctcctcggttaaaattcaagaaaagacaaggtaccggaggggctacctggtgtcaaccctccagtacacgttaacgtctggcctgctaagctagtcgtacttccttccgtggaatgcgttcccacatccaaagattgacagatacgagttacgctcactgattcttctttcagaatcgatttgtatcctgagcatctccagctcatacctggctaggccaccccattcacgctcaacacgtgaatactcagcttccagtctccgaagtcgttcgctcatctgctcctccccgggatgtaattttaagtcaaataccttttcgcttcatgtcgaagacggcccacacatagaagttgcaccacaggtggccaaggtcttgtcgggtaaggagggtgcctgggttaagctcctcgaaatgaacttcaagcatggtccgaacaaaggagtaatcacggcctttcgtctgtagataagtctccagccagcagtgtaattcctcctggacagggtgtccgtggggtaggagttccatcaaatggaaacacatagcgctgagctttcctgtagaaagcgccttgcccatgccctgcactatggcgtcgctcagtttaattgtctgcattctcattcccctccttttgagagtagcgtcttaccgcacttagggcagtagttcattccattttcttgaggaccgtcttcaatgaaaccccattccaggccacagtcagaaaaccagagtcctccggcctgccgccacccacatataacgtccgtagggtacagcagggccggggattcgttgctggcacagtttttgccaatcgttttgtaaacctggtaaatgtcatccatgcttcaagctgccttccataagcttaaaacggctctccatgtcctggcggtagctgttttcccaccaccaccacacccgaagaaattcatcccaacactgggcggggctgaacccgtgagcccggagaagagggaggatgtccacgaaagtgaaccccgcactccagcagtagcctgcgatggctcgaaccgtggagtggtgcaaggacacaccagaactggagacgagggatcgaaccttacgggatgcttcgtcagcgctcatcccttgaccttggaggtgcaattggaggtcttgcatgcctagtaccccaccatacaggtgggcttccttttgagtaaagcacgtcacatcacgcatatcacctcctcagataaattgagccaggaaagagagtcggcgatcattcttccaaatctcttcctctgtgtcaaacccttcctcactttcaaaggggtacatgacgccgaagactttggacaactcctgataagctttggcgacctctgcctcgctcttccctaaccaggtaaggtagttctccacgttccagcagattcggaaccgaggttcgaagcaggagaaggactccttcaaaatagcccagcgggacacggctgtgagcgcgtcttccagcatctcactgacctccgccttgggctctgaaagcttctccagggctagtcgaaggaaacgctgccggagggggttgtcgtacagttcttcgacagcatcttcgtccagaacgaatatcccgtcatccgagagacggccttcgaaggggaggtctacgttcagaccgacacgcatgaactcttcagacaactccgtctggatcatccgaccatgtttatccccccacccgtaatgcaactcccacagacggaggttggagcaaacacgataaccccggtagaaggccgggtgggtcttaccttcagtccaaggccccatatccttaaacacccaacgagccagctccttcaaggcaacctgagtctgccaggagaacttctcgaagtttatctgttcaatcttcctgagtcgcatcacagcacctccgacaggcacttgaggaaggccatgcggagcgggttgtcgtagtggttcttgtagattgtcgcttcgtcgtcgaatgggtacccctcgtagctgaggtcaacatccaggaaggccccgtagagggagtacaggcagtcctccagatcacaggccctttcaggactcacccctcttttgcagatgaggtgttggtatacgttcccgcatatcctgcgggaggtgttaaacggggacccatccgggcagcctgagtggtaccaggccaccaggtcatgcagggacgggatcaattcccgaggcagagcttgcacagcacgtagcagtcgttcatgggtgttcattcggtgtcctcctgtttacgatagcctgcatcatacagcacttccagggcacgggcaaggtccatgctgctcaccaaagagaccatttcctggataccttgctggcgttccttctcggcagccagagtctcttgggacacagggctaatcagccttggaaggatggacgatcccgtctgcttcctgtcattccacacgacaggacgaacggttccacaaacctccttgtgggcgatcacctccaggtagtccccaagcaaccactcatcgaaaggcgggctcacaggagaagagatgtccaccagttggacggtgcagccgacaggagggagtccttcaccgtcccactcttgaggggaggcctcttccttcttctgggggcgggggaatctcggaccaggtaccgaaggttggcggtctgaggtccgatagttatacaccgtaccctgctccgtccaaaccgttacgatcttgccttcttcgatgtgcagccagcagctcaactctccattcagccccagagagaagaagttggcctgaaggggggcctggctccagatgtagctgtccagactgctatagtccactttcccacgtgcctggggttctcccgactcaacctgaggggcggggctgaacgcttcccggtatgaagccacgacaggattatccactacaccctgaggaggggatggcaagggcttggcataaacactcgcaacatctttctcgtaaggggtgggagtacgcccttctgggagacgtaaaccctctgcatcagctacccatatacgggtaaacagatcaccttcctttctccagaaggttgtaaagggagagtccgtccgaacggagtagtgggtagccgaagcaggtgctctgtttaggtctagggtcatgccagtttcctcctgcaagtttcaatgaattcgagacgatgggggttagtgtagatcatgggctgaaggtctcccttccccttctcgaaagggtacgccccttttttaaaaccttcagcgaggagtaaacctgacatggagttgattaccagtaccatagattctacccgacgcatacctttagcctccaagaaagaggccaaattcttacacagacggacccttcggtcaaagcaaggatgctcggagaagccttcatccttccatttcaccagggccaacagcccctctttcacttctggtgcaagctctttccacacataatcacccatttccattcaaaacctcccaacacatgtcgatgaatttcagacgcttcggattatcgtacagctcatccgcccagtcaaggtattctccattctcgaagggatacgaccctcccgggtaccccgcagccaggaacaacgctgacgtgtaggaccaccacggtgcaaggagggattggtccagagaccgatactccaggaaacctaccaggttatcgcacagccggtacgtcttcttgaacaccttatggccatcaggaaacccctcctgcttccacttgccaagctcgaagagagcttctttcacaggcacgggcacacccgtcagggtggcaacgaactgcttagacagctccattctgggcctcctgctggatcacctcatggagcaggtttaggaactccctgcggtgagggttatcgtagatgttgtccgaggtatccaggcgctccccttgctcaaacgggaagctgatgtagtggtacccggcagcgatgaacaggttgcccatttcgaagtcatcatagggcccactgtcccagtggttattcacgttggtgcagatacgccagtagcgggtgaatcggtcactattcctgcacccggccttgtaccaggctacgaactccctcagcacctcctggagacccttatcagtcctgtcccaggcccacttcaggtcagcaacacgttgagcatatgtcagatcagcaatcatatccttcctccttcaacacagcaccaacatccagtaggaacttgacccggagagggttcttgtagatgtcctcagggacctctatccgatgaccaccctcgaacgggtacgaggaggtgaaggacagcccgtaagctgtgaacagatcaaccagggcatactcaacacctgtctcaagaaagatgttggagcatagccggatgtacttggaaaaggtgcggtcaccaggcataccttccttgtaccacttgaccatcctggccaaccctgccttcacctttgggtggaggagcttcacagccagtacaaaacgcacattctcacacatcattcttccctccttccaaacgcttcatctcatcgttgtaatacatcttggacatcataaccaccatgtccaggaaatgcaacctgttgaggttctcgtaataccgacccatctcatcccgctcatcccctagctcgaagggaagggggtgccctctggaaaacccagcccaggacatgaggtattccagcttccagttcaccatcgccaggtgagtgtagttgccatgggtaagaaggtacttccccacgttgttgcagattcgtttctgtctttcaaacacgggatgctggggacatccttccttagcccagctagccagctcacacagggcaacacggatggcgtggggagtcttcaggaaagccccgtagcaacctacaggcagggagccggggtcaacatcatacataaacaaaaccatggggtgcctcctatctggcagcgaatgtggagccattgtgaagccccggcaggggcctgtcaacatttttcaattcagaaacccacccccgccaaaatttcagatgagcatggggcacccttcctgggcaccagcctggggaatatatctgggggcatcctggggaacgggcctggggggcgtgactggggaggggcatccgttttcaaatttcagcgaggccgctggggtatttaacaaggcccgagggtggccatgaggcgccgtcatgatctggaaatatccaggcttcgtcgaagcaaatgtatctgttgaagctggggcatggggttgaatgtcaggggtgtggcatggggggtggggcaatatgtgagggtgaattgtgtaactcaggctgcctatctgagcctggctagcctcgaagaggcctgtcaattcaggggtgagggtaagcctattgtgtaatgcaatccttccccgggctggccattgtaatggcctacaggccgcatgaatcgggcattctctattcggtcgccataataaagggggaactcttcccgtgagggtagagagacgccggcattagctcgcctcgaagaggtctactagggcatgggttggcatgggttacacaatcgacgtattccaggggctgagcacctaggatgcaatggggatggtcataggttccctggctggggatattctgctgctgggatggggaatggttacacaattggcctagctgggactgtctggtgatcctggcatgcaatgccgttacacaatgggccatgaccatggccaggatgttacataattgggctggtggcatgggaaggcttcgacgaagccagccagtttaggagggcaggaagggggcaaatgcccctgcccgaatgacagtctgaagactgttacacaatgggtcacgacgtgacctagtgaatgttacagaattcttgacagagaggagagaccaatggcttgaccatcctacccggatgctctgcgcatgattggtgctatgactggtgattatatggcttcgtagaagcctgttggaatggactcgaagagtccagttgatacggcttagacacagggcgggggcaaatgcccactccctccccgataggccccctcggggcgcgcatacggccttttcctggcctttcctatactagggtactgcctaagctaacctggcttctccgaagcctatacgccctcttatcatcgccataattcccctgtactcgtcctgtcccttacacacctctccccgcccaccaaacccaccctcacaccctcttactcc

SEQ ID NO: 17 - DNA, 89926 bp, Nankokurvirus EPa18
  source 1..89926: mol_type = genomic DNA; note = EPa18
agccattggtctctcctctctgtcaagaattctgtaacaatcactaggtcacgttgtgacccattgtgtaacagtcttcagactgtcattcgggcaggggcatttgcccccttcctgccctcctaaactggctggcttcgtcgaagccttcccatgccaccagcccaattatgtaacatcctggccatggtcatggcccattgtgtaacggcattgcatgccaggatcaccagacagtcccagctaggccaattgtgtaaccattccccatcccagcagcagaatatccccagccaggaagcccatggccctccccattgcatcctaggtgctcagccccgggaatacggccattgtgtaacccatgaccacccatgccctagtaggcctcttcgaggcgagctaatgccggcgtctctctaccctcacgggaagagttccccctttattatggcgaccgaatagagaatgcccgattcatgcggcctgtaggccattacaatggccagcccggggaaggattgcattacacaataggcttaccctcacccctggattgacaggcctcttcgaggctagccaggctcagacaggcagcctgagttacacaattcaccctcacatattgccccactccccatgccacacccctgacattcaaccccatgccccagcttcagcagatacatttgcttcgacgaagcctggatatttccagatcatgacggcgcctcatggccaccctcgggtcttgttgtaaccattccccatcccagcagcagaatatccccagccaggaagcccatggccctccccattgcatcctaggtgctcagccccgggaatacggccattgtgtaacccatgaccacccatgccctagtaggcctcttcgaggcgagctaatgccggcgtctctctaccctcacgggaagagttccccctttattatggcgaccgaatagagaatgcccgattcatgcggcctgtaggccattacaatggccagcccggggaaggattgcattacacaataggcttaccctcacccctggattgacaggcctcttcgaggctagccaggctcagacaggcagcctgagttacacaattcaccctcacatattgccccactccccatgccacacccctgacattcaaccccatgccccagcttcagcagatacatttgcttcgacgaagcctggatatttccagatcatgacggcgcctcatggccaccctcgggtcttgttaaacaccccagcggcctcgctgaaatttgaaaacggatgcccctccccagtcacgccccccaggcccgttccccaggatgcccccagatatattccccaggctggtgcccaggaagggtgccccatgctcatctgaaattttggcgggggtgggtttctgaattgaaaaatgttgacaggcccctgccggggcttcacaatggctccacattcgctgccagataggaggcaccccatggttttgtttatgtatgatgttgaccccggctccctgcctgtaggttgctacggggctttcctgaagactccccacgccatccgtgttgccctgtgtgagctggctagctgggctaaggaaggatgtccccagcatcccgtgtttgaaagacagaaacgaatctgcaacaacgtggggaagtaccttcttacccatggcaactacactcacctggcgatggtgaactggaagctggaatacctcatgtcctgggctgggttttccagagggcacccccttcccttcgagctaggggatgagcgggatgagatgggtcggtattacgagaacctcaacaggttgcatttcctggacatggtggttatgatgtccaagatgtattacaacgatgagatgaagcgtttggaaggagggaagaatgatgtgtgagaatgtgcgttttgtactggctgtgaagctcctccacccaaaggtgaaggcagggttggccaggatggtcaagtggtacaaggaaggtatgcctggtgaccgcaccttttccaagtacatccggctatgctccaacatctttcttgagacaggtgttgagtatgccctggttgatctgttcacagcttacgggctgtccttcacctcctcgtacccgttcgagggtggtcatcggatagaggtccctgaggacatctacaagaaccctctccgggtcaagttcctactggatgttggtgctgtgttgaaggaggaaggatatgattgctgatctgacatatgctcaacgtgttgctgacctgaagtgggcctgggacaggactgataagggtctccaggaggtgctgagggagttcgtagcctggtacaaggccgggtgcaggaatagtgaccgattcacccgctactggcgtatctgcaccaacgtgaataaccactgggacagtgggccctatgatgacttcgaaatgggcaacctgttcatcgctgccgggtaccactacatcagcttcccgtttgagcaaggggagcgcctggatacctcggacaacatctacgataaccctcaccgcagggagttcctaaacctgctccatgaggtgatccagcaggaggcccagaatggagctgtctaagcagttcgttgccaccctgacgggtgtgcccgtgcctgtgaaagaagctctcttcgagcttggcaagtggaagcaggaggggtttcctgatggccataaggtgttcaagaagacgtaccggctgtgcgataacctggtaggtttcctggagtatcggtctctggaccaatccctccttgcaccgtggtggtcctacacgtcagcgttgttcctggctgcggggtacccgggagggtcgtatcccttcgagaatggaggataccttgactgggcggatgagctgtacgataatccgaagcgtctgaaattcatcgacatgtgttgggaggttttaaatggaaattcgtgagtatatatgggctgagctttcatctgacgtaaaagaggcactgctggccctggtgaaatggaaggacgagggattccccgagcacccccactttacccgaagggtacgtctgtgcaggaatgtggtctctttcctggagcacaagggcatgggtagggtagatgccacgatacttacaatagactccatggagcgcctgacccgttacgagggtcttaaaggaggagcgtaccctttcgaggggaaagtgaaagacctccaggatgtgctctattccaaccccaaacgtctaaacttcattgaaacttgcaggaggaaactggcatgaccctgaacctgagtaaagcacctgcttcggctacccactactccgttcggacggactctccctttacaaccttctggagaaaggaaggtgatctgtttacccgtatatgggtagctgatgcagagggtttacgtctcccagaagggcgtactcccaccccttacgagaaagatgttgcgagtgtttatgccaagcccttgccatcccctcctcagggtgtagtggataatcctgtcgtggcttcataccgggaagcgttcagccccgcccctcaggttgagtcgggagaaccccgggcacgtgggaaagtggactatagcagtctggacagctacatctggagccaggccccccttcaggccaacttcttctctctggggctgaatggagagttgagctgctggctgcacatcgaagaaggcaagatcgtaacggtttggacggagcagggtacggtgtataactatcggacctcagaccgccaaccttcggtacctggtccgagattcccccgcccccagaagaaggaagaggcctcccctcaagagtgggacggtgaaggactccctcctgtcggctgcaccgtccaactggtggacatctcttctcctgtgagcccgcctttcgatgagtggttgcttggggactacctggaggtgatcgcccacaaggaggtttgtggaaccgttcgtcctgtcgtgtggaatgacaggaagcagacgggatcgtccatccttccaaggctgattagccctgtgtcccaagagactctggctgccgagaaggaacgccagcaaggtatccaggaaatggtctctttggtgagcagcatggaccttgcccgtgccctggaagtgctgtatgatgcaggctatcgtaaacaggaggacaccgaatgaacacccatgaacgactgctacgtgctgtgcaagctctgcctcgggaattgatcccgtccctgcatgacctggtggcctggtaccactcaggctgcccggatgggtccccgtttaacacctcccgcaggatatgcgggaacgtataccaacacctcatctgcgaaagaggggtgagtcctgaaagggcctgtgatctggaggactgcctgtactccctctacggggccttcctggatgttgacctcagcgacgaggggtacccattcgacgacgaagcgtcaatctacaagaaccactacgacaacccgctccgcatggccttcctcaagtgtctgtcggaggtgctgtgatgcgactcaagaggattgaacagataaacttcgagaagttctcctggcagactcaggtggccctgaaggagctggctcgttgggtgtttgaggacatgggtccttggactgagggcaagtcccaccctgccttctacaaaggctatcgagtatgcaccaaccttcggttgtgggagttgcagtacggatggggggataagcatgggaggatgattcagaccgagttgtctgaagagttcatgcgtgtcggtctgtgcgcagacctccccttcgaaggtggtgtctcggatgacggcctatacgtcttggaagaagatgatgtcaaagagctgtacgacaacccccttcgtcagcggttcctccggctggccctggaaaagctttcaggccctaaggtagaagtcagcgagatgctggaagacgccctcgcagcagtggcccggtgggccattttgaaggagtccttctcctgcttccaacctcatttccgaatctgctggaacgtggagaactaccttacctggctagggaaggataagggagaaatctccaaagcttttctggagttgtccaaagtcttcggcgtcctgtatcccttcgaaagtgcggcagggtttgacacagaggaagagatttggaagaatgatctccgactctctttcctggctcaatttatctgaggaggtaatatgcgtgatgtgacctgctttactcaaacggaagcccaccttcacggtggacggttggggattcaagacctccaattgcacctccaaggccaggggatgagcgctgacgaggcattccgtaaggttcgattcatcatctccagttctggtgtggctctccaccactctacggtccgagacattgcaggctactgctggagtgcggggttcactttcgtggatatcttccctcttctccgggcccatgggttcagtcctgcccagtgttgggatgaatttcttcgggtgtggtggtggtgggaaaacagctaccgtcaggacatggagagccgttttaagcttatggaaggcagcttgaagcatgagtgacatttaccaagctcaaaaggaatttgccaaagcctgtaagagcacgtctgtggtagtctggtgtaggtgggcccaggctggaggactctggttttctgactgtggcctggaatggggtttcattgaagacggtcctcaagaaaatggaatgaactactgcccgaagtgcggtaagacgctactatcaaaaggaggggatgagaatgcagggaattaaactgagcgacgccatagtgcagggtatgggcaaggcgctttctacaggaaagctcagcgctatgtgtttccatttgatggaactcctaccccacgaacaccctgttcaggaggaattccactgctggctggagacttatctacagacgaaaggccgtgattactcctttgttcggaccatgcttgaagttcatttcgaggagcttaacccaggcacccttcttacccgacaagaccttggccatctgtggtgcaacttctatgtgtgggccgtcttcgacatgaagcgaaaaggtatttgacttaaaattacatccctgggaggagcagatgagcgaacgacttcggagactggaagctgagtattcacgtgttgaacgtgaatggggtggcctggccaggtatgagctggagatgctcaggataaaaatcgattctgaaagaagaatcagtgagcgtaactcgtatctgtcaatctttggatgtgggaacgcattccacggaaggaagtacgactagcttaacaggccagacgttaacgtgtgctggaggggttgacaccagatagcccctccggtaccttgttttcttgactttaactgaggagattccaatgaaaacttatgaagcttctgtgttgttcgatgccagtctggcaggctctttatctgttgaggccaacagtgttcaagaggccatcaacctgctagaagacaaggtgggttaccactccccaaccttgtgctaccagtgtgccggccacctggaccttggggacatgacgggtatggtggtatactgcgaggacgaagaggtagcagacaccacctacgccggtgaggtcatacgcacgctgaacaagaaggtgaaaaccctggaagaggacctcagcaaggcatacaagctgctgagtgaaatccgtcccagcatccctcaggatgtcctgaagctgtggtgtgaagaccgagataccattctctctggcctgaggagtgctgaatgatggaaaaccgtaatgggaccactgaaacagcttgcccgaagtgcggaggctctggtcacgcggattctggaggtgttcaatcttggggtgagcctatctccatcccctgtgattgcctaaccgagcaggaagagttcctggcatgggccaatgaggaatacgaggttgaagagggctacgagttgaacgaaagcaaccccgccgtaatggaaaacaagaaaggctggatggcccgtgccgccctgcccaagcgttctaaattccgccaacacctggatgagtgtgccaacgaggttgatacttggccctcttataagcgtgaagccctgaagaacccctccccgaagtgcccgacctgccacgatcaaggcgaggtgttcatcggccccggaaaggtcgaatcgcacatgctggaagagccggaactgatctacgcaccgtgccctgactgcgcgaaacccttcccggtgcaggccgagcaggcagaggcggagcggccggaggtaatcagggttccgtcatgtgagaacagttatggcttcggatatgtggacggaagctgccatgttgatttgcggaagtaccgcaatcaccttgaagacatccttgattcgctcccgaacgatgaaccactgatgaccgtctcccagcacgaccgcatcgtcggggagctgcgggcggaaatcgcaatgctccgcagctacgaggcggagtgggaactgctgctgaatgagcatgagcaacagcgcgacgccgccctggccagggtcgaggaactgggggcgaagctgggagcggcgctggaattacttcgggaatcgcgcggtttcgtcgattgcgataatcctctcaacgagagcggtcaaatcaagcttcttgaggaaatagacgtattccttacatcacctatagcccaggctcagcacagcgtgccggaagagttcagcttcgagtatcgccacccaaacggagagagccatacggtgacggtcagtcgggatcaagtgattaatgagatgcccgatttcctgttcgaggcgctgtgcagcaagttctgcaactgcgagccggcgggcgagacgaacgttgtcgagtgttgctgcgacgagtacgcggaggaattcaaactaatcgccgccgcgcccggcaaggaggtggtgtaatgggaatctggatggaagttaggtgtgaggaccggtccgaggagtggtccgaaggtcacggctatttcccgcacaggtgttggtctcacgaaaatgaaggaccaatgggagaagctcctgaaacaagggaaggagtgattaacacgtacagacacctggaggaggaagcccggtccctggggtgggtaaggttccgtcacgggtgggtctgcccctattgcaagaacctcaggcctaaggtatagttggcttatctgtcggaccatccactcgtaaggaggattaagaatgaacattgattggagtaaggcacctaagggtgcaacgcactgggagccaaatggcccccgaatcttcgaaagctggatgaagaacgagggtgactcttggttctggtgggacgaggttggaggaaagtggagaccttctatccctatctcagaacagaggctggggacattcgaagcgagatcgcaagagacctggaacggccagggcctgcctcccgttgggacggtttgcgaggcaatccacgaagacatcaactcaggcaagccggtaaaggccgagatactgaagcaccacgacaacggtctgtcggtcgcgttcttctgggtcgacgcacctgtcgaagccgaaggaaatctgtactgggcccaacgtttccgccctctgcgcacgcccgagcagattgccgacgaacagcgtcgtaaggacattattgagttggctaacgtcatccgtgatgctggtgatggaaatgattacatgctggcagaggccctgcatgacgcaggctatcgtaagaaggagtctgatgatgactgacatgagagaacagtttgaaaaccgcttcccgattcctgagggcattgaatggcgtaataccgactacttcccggtgcagaccgataacgtgcacgtctacgtggcgctggcaggagcggctgcaaggtactcggcgatgtggcaagcctggcaagccagccgagcggctctaaaggtacagttgccggacgacgggatcgaggactgccagcgagactggcagaactcctgccgagataacttcgacacaggttactgctatgcaactgacaggatcattcaagcccttcaacaagccggaatcgaggtgaagccatgaccaagaagcaaacacctgaacagcgcattgagcgggcccttgaggacttccacgcatacaaatctacgtggaaacgtgatgaacgtggactcgttccgacattcattttcaaaggaaagcgtcacacccttatcgaaatgcagctcaagatcgaacagaaaagaaagcagatcgcatcaaagatattgaaaagcatcaacgacggggtgtggctatgaccgatcacgcagagctgcggagggtggctgaggcggcaacgcctggggagtggcatgccgtgtgggaggaaggggatgacgcagcatgggcgaacctcttcccgatcattcaggcagagtgcggagaggtagtgatcggaaacgaaggtttctactccgacctggaccaggataaagctaacgctcaattctgcgcaacagccaaccccaagaccctcctcgccctcctggacgagattggaagactcagggatgaagtcttggccctgcgcgaaagggttggggttgctccggcccgtctcacgaacggcgacagtattggcaacatgttgcgagagattggttacgccggtgaagtcagttaccatcatgcacgagaaatttggaacgcctgtatcgacgagcaggagcgcctcagcagcctcatggtgagcgagcaagagggaggtaatgatgtcagcaatcatcagtgagtgcggtaaatatcggtaccgcctggatcgagactgttcgccaccctttgagggtagcaaggtgtacgcctacttcggtgttaaccccagcacggcggatgccagtacagacgatgctaccgtccgaaagtggagaggcttcaccgagagaaatggaggccataggttcattgtggggaacgtcttctgctatcgggccaccgacgtgaaagagctgcgaaaagtggacgacccgtttggacctaaaagcgtggattacttccagtccatcctggccgaagctgacatcctggtgccgtgctgggggagcctgtcaaagctgcccaagcaccttcgtgggtgccctcctcaacttcttcagtggatgctccgctctggtaagcccgtcatgtgcttcgggctcacccggtgtgaccaaccaaagcacccccttatgctgggatacgacactcctttgcaggagcttgtagggagctggtgactcttttcacctctacttaaagccccgggccttgacaggtctggggctttgtcgtatctttctttcaacaaacaggaggtggtatgaacggttctagaaaatttcacagccccgatggtccagctttcttcccgggtgaaatatgggtaagttgcgaagggtttgaggttgagattttgaaggttgagcggtacggtaccgacaagtgggatgttgacgtttactacatccagtgtcggtggaaaaatgcagatgatgctgtatttgtgaaggatgcttggaatttccaagtaatatatgaacatcaagcagataggagggtacatgaaaaaattctctgagacttactactcttggtcgggggttgccagccgggcaaaagttcttactgacctgggttggattatctctattcacagggagaaggttgaaggttctaccagtcttgtttggaaattggaggcaacgcgatgagtgagaaaggaatgatcctggcaaagtacactggccttctgtgtggggttaaagtcctccaacgtcaaggagataaggttcgggtaaaggtggtcgatgagaagcgtcccaaatgggttgacttggcttctggctcctacaagctattcaacaatactgatgaagcaatccaatggattgaatccgaggaggtgaccaatgaaacaaactgaaactgctatccgaaacatccaaagaatcttcccgttcatggacgatactcgggcagatttggtcgcggacgttttagtcatggtagggggctatttccccaaccttcggaaatgcagtccacttcttctcaaccagatcgtagttcatcacccagaccttaaccgacaggaaagtcgaatgctgaactcccgaagaaaaacgtatcatcacctggccacactttccaaccagttaacccgtagtgttcacccctcccaggcaaaacgtctacaccgcatagcctctatgctagcgaagtaacctccaaaggcagctatttagctgcctttttattgccctttttcagcctcctttgatcctctatctcactcactccgtacagtctgtagccccgctgcaagcgctttgagaagacttctattgaacctgtacacatccacgcctctcctccttcgtacattatgtaagcttcgtatttcaaacccctgccctccatctttctttcctgcaaaagaaaaccccgccaactttcgccagcggggtttcattcattaggcatcctgcctggtgttatcccttactccctttgggaagatactcctcaggcatggtccagtcatctttcaacagggaaaccgtgagaggaacgcagcattcctgccggaaacagctagtttcacacctgtgatgacagcggcctccatccaggcagcgggttcccaagatttcgtcttctcctgctaaaatgccgcattcagccttcaaaacggaagctcccacttgatgagtctttccagggctacctcgatgtccttcgctctcagggggtcttcgtgcccctcgacggggaatgttgcctctaccttcacatcgtcgattaggcaagctccagggacctttcgtactaccgttgggaccacgatggagacgatttcacacgcgggagcgtaactgtacacctcgaattccgctgaggccccttcatactcattcccttcgggagtccaacgactccacacgtaattgacgacaattctcattcgttccacctcgtctcaccctgggcttttctttctagcatctgcttctcctgagcttcctggaaccgggcctcatcccaggaagacttaccgtcaaccaggattgacgccagaatacccaggattgccaggactatcatcgcttctgtcagggtgaaccctttttcctttttcattcggtctccttggcttgggtgaggagtacattggcttgtcgctccatctcggcgatgtggagacgctggaagccattctgagtttccatgggagagaggagtacctggtttgccgggtaaccttcctccggagtttcttgggtgtccggctggggcaggtagcggcgacggtcaagctcttcaaacaggataaccatatccttgtccatctcacgagtgcaggtgatcaccccgttgattttccagcccacgccgccgccatggatggaggttacgctgacggtgaaaggatcgtgtttgttgctcatttgggtctcctgaatgtgaattgaaagaacatcttgttgaagagcgtctagataggttcggacctctttgtttcggttggccttactgtccaggtggctcaggtgtaagtagcttgcagggcccagccgtgcagctctgtccgaaaccaggttgaacagcttgagggtgtctcgcttgagatttcccgacagaacgatccaggaaggctcaaactgggggccgtctgcatgatctgtgtacaggtctacggtcagagtgctcatatcataccccgttgttaaccaaggacgttaccagttcggtacggagctggatggtgcttggatgcccttgaagggtccagtcatcgtactggcccgccttctctttcaagaagctgtacatggcatccttgaggtaattcttgtcgccagtaaattgccgctggcaaaacacttgcatacctttaaccgtgtcttgttccaggatgagggtaatcggtcggtttttcatagtatctctcctctttcacgggcttcatcctcgacatcatctgtcaaggctttctggaactccatggtacacaggtagaccatttcattcaagattctcttgttgagtttctttctccggttctcatgctctactacctgagaagcttttggacgtttcggaagcttgcctaccaggcagtcgtactcctccacggtcagcaccctgcttgcctggatacatccaaaaccctctccaagttcggtcataacttccaaataggagacgtaagctagaccatgaaaaccctcttccaggctgtttagcttcaactccataacagctaatcccataatttgtacgccctcactgtgccgcccgagtaaatatccagtgcctttgctgcctcaacagcctcctcggcactggcccctgccatcatggctcccatggcaaactgtgtgcctgatcccgcagcccttggcctgtccaggttcaccttctcggtgtagatgcctccgtcccaggagatgaagtgcagcccgtccgcatcaaggactagaccggagaccttcagctcctggtcctccattgcatccccgtttacataggcctcggcgagaatcttccagtcgaatactgcccctgacagccagaaaacacagcctcctacctcgatacgtttttcagcgtcctcgttggtgatgatactgttctgagtgatccttccatccgttgctacgatcccatccttgtaggcgatggtggtcatgcctttccaaccttcttcaggtacagacgaatcagcgggtagctgataggcagcagtccaacgaggattaccactcgggcagtccaccaagccagaagaacagcagcatcccagacttcagctccgaggcatgccaagtcctcccggttgaatggcgcttgaaagtgaagcttcagttgttccattttggacatctttttcatgattcctcctatgggcagcagcggggagagcccccgcagtagaattcaccatccttgcagtgtccgaagtagtttggataccctgacttgccgcagtcccccgcacagtctacttcttctaccagtccgttttggatttcattttcccacaacacctctcggaggtgtaagggcactttttgccagtcaaatcccattatagctcaccgagtgggctgaggacaggtcccagataaggcaatctttcagaaccagctccgtccgttcgggtccatctaatggaaccagtgcggtcatcgaagtaccgtcagagtaggaatctttcacatgaccgaaacctcccttgaagaggtatgtacggtaaatcaggtcatcatcgaacccttccacccccttcaagtacagcacgacactgatccctcgctctaggttcgagattgcctcttcgaaattcacctgcttcattcttcctccttcgcttcaagccacatggcacgggtttccaccatgatattgtccagggttgtattcccgtataggtgcttcttgcagcgggtggcagcaacgtacaggagattctgctccatctcgttcaaacctacccaccgcttcttgtcatcgtacccactcggatagtcgtcagccaggacaaccacatcaaactcccgacctttggacttgtgtgcagtcgtcagtacgatgtctgccgagggatcattctcatggtcacggagggccttgaaaatcttccactggtcatccccttcgatgatccggcacaccctgcccagttcgcccgggctctctgcgtattcgtcccggaactcttgccaagaagtgtagcacaggatgttttcgtgcttcaccttcttctcgtcaccctggtacagggcggtagcactctccagcagacggataaagtctcgggtgtcaatctccagtcggacactcttaccctgaccaatcaggtttacagcgtcccacaccaaggcggcgttggtccgatagagccgggcatgctgctccgggatttcaggtaccccttcagcgtcaccgtccgccaggaagccgttgctctcccataccttcgattccagcttttcccacccgtgcagggcttgggctttgctgttctgtaggataatgttcgccacttcagccaccttctcaccgaaacggaagctggtggtgagcttgcactctggggccttaatcttggccatagcgttcacgctgccacggaagctgtaaatctgctgccgagggtcaccgaccatgaccagcagggagtcctgctgacgaagaacgatgtccaggacgcaatcgttggtgtcttgggcctcgtccagatagatcaccttgtactggctgaggtcaggcttggagagctggtacagcttcaggtaggtgtcgtggttgatcagcgtctgctcgttcgggtcaatacgcttcttccacaaggcctttgcatagcggagaaccagggcctcatagtagggaaggtctacacggtccttctcggaaagctttgccaggggcatgtagctgatgtgcttgacctcaagctcctcgtctgccgaatactcgaatcggttcaccgtatcgcggatcgcctggccaatgctggaagccgtgacggtgacccccatgtccgattccatgctggcgatcttgaagtagcgggcaatctctgccccggtccccaggacgttgacgtagccccctttggggcggcgaagtttctcgctgagcttggccccgaacaccccatatgccaggccgtgggtcgtcttctttaccacccactgcgggaacttgttcttggcctcttctgccatggacttgttgaaggccaggtacagggaggtaacctggaggcgttgagagaccaggctcatggtggtggtcttcgctgcaccggcaccagcattgattttcaggcggcgattcggacgttgctcggctgccaggtcttcggcagcttccatgatgtcccactgctcactggtcggggtgaaactcataaaaattctccttaaattcacaaagcttggggtatgccaacaaggccgccttcatgtaccgactggcttgcctgtcgtcgatgaggagcagtttacggacttcctctgtggaaatcaaggggaggaaggtaaatattttacgcagagccgatttcgacagaggcacctgtctgtagttgcctgtcgtcccgctcacaccctccttacccccggcgctggaccggtaccaatccaggttggcaaccccgtggaagatgttgtccatctccaacggccagggatcatccctctcaaacgcgatgaacgagaacaagggcatcagttggttttccaactggcgccccttcttgttccccttgcgttctttgtcagccctgagccgattagcccgcttaatcagctcatttgcccgggcttctattcgggaatagtcccgtatcggtcctccattctcttgatccattctgttgcccaacctctcgattcctcgttgtgaaggttcgtcacccgaacgccgtgcgccttagccagcttgacggctgtgtttgtgcctccctggacgctcccgtccttgttcgggatagcgaagcatattaggaattcactgggagtctccagatcatcccccagcacctggaagacattcctagtgtggagcttctttgcccccgggctgaggtgttcccaggcaggatggaactgctgggcaatctgctgggctctgactcccagatcgtaggggatatgagacagggagactacagcaccaaaggcatctccatggtgaagcctgtcatagaagccattccacggtatgtagattcggccattggaagtaccatcttcatcccatatctgatgcttccaccacccctcttcaaaggcttggtctgcccctggggctccgcctgtacggagggtaatcccagcggcggataggtagtaccctagcttgaccatgatgtcaagaatatacccaggagtctcccgtgaccctacacctgtgtagaacacactcatgtggttacctcgaaccctttagattccaggaaggacgtgatgtcgtatacctccatctctcccaaaatgtcccggggatggatattggagatgacgtaatccaagatatcatcatcatccagttgatccagaagagcatcgaccgtagactttacacctgatagctcgacagtcacttcaggtccggaatacggactgtacgttgcttcaacctcgaccttcttggcttcgattaccagttccatacttcctccttatgatttgtagtacacgtgccgctcgattctgagcgtctttttcatggttttcgtccagcggggcatatatttgaccttcgcagggttcaggtagtgatcagcaccccccgtggggtctttggacagaccttttaaagccctccaggccactaccttagattgatcccactgggccttctcttggattcctgcctttcggcttccatcacaagtgtacgagaactggcaacggaagtacaccactcctggaactgttgaaggccatcggtctgggttgttcaccctgttgatgatgacgtgcgctacaccttccttccctttccagctctcgccccgggcttcgaagtagatcgcctctgccagggttctacaggacttctgacgctcgcacaataccttgtaggtttctcttttctggacttcatccaggggctgactgctgagaaccgcccgcttctcaagaagatggaagcgagaagtctcaatgcctaccatgatctcgaacagtagtccggacgcggccaatagagtgctcagacagagcgcttctagggtcttcattcgggctcctttctatcaggtgggtggtatgccggcattgcgccggcacggattacaggaacgaggccaggccgttccggaacacagggaaggcggtactcaggaattcccggctgaagttttcttggcagaacttcacttcatgcttatagcagaagatgacgaagtttgcttgcttgctcttccgagtccgagtcaggaacactcgtttgacgatcttcgtagcctggctcaactggaagccgtaaggggtcagctccaggcctttcagtttgggattagaaggggccaaggtgccgctgcctcgaccagtttccagccacaagctcttcggctcgttgtgaagatcgactgcggtctggaaagacagcgtttggaggcccttactcttcagctcgggaatgctcgtatagaagctacccgactctgccaggaagccatagcccaggctgcccatgaaacggatcaggctgtccatttgaagccatgcagtgttcttggcggtcgccgagtcgaaagttgtacgatgggtgaatcgcaacagcattttcatagtaaactccttctgtgaactggaggccagtatgcctggcctccttggggttgtcaacctcagtctacgggatttccattttcgtccatttcacgccagcacaggccgactgggaactgtggaaccagggtcttcttgaaacggccttggtatttcaccttcaggtaacgcccgatgtacttctccggattggccagttgatcccggcgagccgcatggtctccgaaggttgtatcgaaaattcccgtggcgtattgtccacgaccgtctgctttctccttcactttggggcagaagacgcggagaactgcgttcccgtctttgccttccaccacgtcaacaacctcgaactcctcgtccaggaatttcttgtacttctggaggtcggaagatcgctgggatgcttcgtaaagccccgtcatgttccgaatcattatgccttcgtacccttccatgaccaccttatcgtggtacttgtctacatcctcccggaagaagattacgtcctgatccactacaaacagggtggggttccccataaggtctgcgctatagacaattcgacgaagtgcgtctagacgccaagagaattgggtatcaacggtaacacccaacgctttacagctcactacatcgaagatgtggtattgcaacgccggacgcagagcagcgatgtggattgccaggtccaaggcgtcttgggcttcctggagttcaaaatcatcggaaaactcgtcgtcctcgtacttcataagcttcttctcagctttctccacctctttcaaggtgtcagtacgcttaactgccgactggatgtcttccagggactcaccgtgcaggtaaatctcaccatcaaaaatgtctccaatctccatgatctgagccagagcctcggcaacgtgtggcaggatgtactgctccccgccccgactacgaagctccacacgcccatcttcatgtcgaagagccaggcatcggacaccatccatcttggggctgtagatggcggggaaggtgatggacttggagcgcttcaggtaatcctctgccagcataggaaggataggaacatggtccagatcactcttatcttctcggtaacctgccttgaattgcttctcaaccttggaagtggcttccagatgggcctgctgctcgccagtggtctcgtttgcacggcctacgttcttcggcttggaggtggtcaccttgacagtcagctttccaccctcctttccatgctccacgaataccttgtcaccttcactccagcagctccactgcttgaagttgccgcccttgtccttttggtacatcgtcactttttgcataaaccctccttattaacgaaattcaccgtctgagctttttaccagaatggcaaactcatccacctcgccgagcgcttgtactccaaactgctcttcatatgggttgcttccatgctggtcagcaacatgcacagtagtcagatacagctcatccatgaaggctcccaggggagttgttgccgccactgcggataccttgcctacaagagctgcaagcatctttgtctcttcgtaagatagctcaagcaacacccgttcgcgtttcttacagtcttgtgcgtacatgtttaatctccttttggcatgtggatgacttcaaccccgttcttcagcaggtaatcaatgcctgccgtcagtcggtactggtggcgatagtacaccctcttgatgcctgcgtcaacaatgtcgtgagcgcagtattcacacggggacatggtggcgaacatccaggcaccctgagcactctcctggctgcatgagagccaaagtagagcgtttttctcggcgtgccgtacctcgggcctggtaaccccctcctcgttctccagagggccttccaggccgcttgggaggccgttgtacccctgactgatgatcttgtttccctggacaatcactgcaccaaccttcgcacgaacacctacagagcactcagcgaaggactcggcgcagcgcatgaaagcctctttatgcttctgcttcacagggagtacccctggcttttctctgggtattccaacacataccggtttttaacctgtacatcgttgatggcgttgtacgagtcgatgcacatgtccagaaccagctcagcaaaggattttgacaggtccatccctgtcaggtcttcgatatttgggcaccgacttttaagtgcgactgctccttcgtaaatctcctgctgagcaatgatagctttttctaggtgtccctcgggaatatgtacgtctgggtcggtagggtccataacccacacctcagcctttctcacggtgtttggccagatcaggtggcagtcccgccatttgttcggatgccaggataataggcgatccagaagtggttgatacatcttgacctttgggcggtaaaccgtgagcccgttgttcagtttctccaccacaatcattgtcttcataacacctcctaggatggcttgcgttggccttttctggttgctgtcccccggcaggtgaggtctcctttggcctgctgcatcttgctggccttcacagtgtaccgcccctttccgtactcttcgtctacgaacgtctgggccttcatcctatctcgggtgtgtacgaatacataatcacccatagcgttctggatgtaccaggtagctggcggtgcgaagtccaacgccgagaagtcctggaaggtcaccacggtagttcttggggtactgctcatgtttactccttgcggtattacttttgcaggggcatcctatacagactctcctgctctgtcaacttatttcaggcgcaaaaaagcccgccacactgggcgggcttaggttatcagctttccactgcttcttcggagacttcagcggtctcctcttgcttggggcgtttctcttccggcactacaacgctgtacagagcctggagcatcaggcctacctggtcctgtagctcggcttgcaccacggcgtagcggccattcacttccatgtagtccttggaacgcaggaaggagtccaccttgcggattttcttccagtcggtaccgtctgccgtcatcactcggtcgaactctttggccaggggttcgaggttgaccacctgcacagcctggtacagtcgatccagagtatcttcgtccggcataatcggtacgagaacactcatgagggcgtcatgtgccatttgcttgaacaggtcctgtcggttcagttgagttgctttctcagtcattcattctctcctttttcaatttgttcttgctcagcatcatcctgctgcttaggtttcggctttggctgccgctttttacgggcaggtttctcagtagcctggggctcggcttcaggttgtgactcagcttcagcttcgggctcggaagagccgaagtcgaacacaacgttctcatcttgccccttctccaggacagcccagtgcaggctactggacaacatggacacacgggaggtgtccagggtgtatcctgccagaacctgggattggaatgcaagcaggaaattcatgaggttgtagtctttgacctcaacggcgttctcagagagactctttacggcctccgggctggcgacttcagtcgggccacacacttcctcgtggaagagggtgatggtacgaacacccgaagcagagctgaccactgggaatccagccatggtgttctcaacacggtagccttcagcgatggcatcttccacggcttgcaggaagctgatggggttttgttcgactacacggatacgcttacgatccgctggataagcaggttttacggacatttttgattcctccttgggattgagagtacactataccaccatctgaagcagaagtcaaggcttgacaagctaaagaatttatagtaatattattaaatatattatatataatatacaagggagggagtgggcaagtgccccctcccttgtactaagtatataattaatattaattactataggttaatttttatgagatgtaaaggctgtaataggataattaagtatcctagtaagaattcagtatcaggtaagcatgaagacctctgctccctgtgtcaaggccgtgccaagatggtaggccatactgagaactacgcattccctcatgcgaagcagggcttgacaccagtccgtcaatgtgactagggattgacaaacacacctacaggatgctatagtatctatagatacaccagtttaagacctgggagggttcctcctccttcccctctcaggcacccaaccaaggagtaagtatgagcaagttcgtaaagggccagagtggcaaccctcgtggtcggcccaccaaggaagctcaggccctcaaggcgatgtctgccggagagcttgatcacatcctcaaaaagctgaagcctgccagtgccaaggctattcagctcatgatcgacgaaatgaccaatgcgtcccagacatctccagtacgtctcaagatggctgacaaggtgttcgctgcctacctggcagccctcagggcacaggcgtccattgacgcagtaaagaacaagtctgacggtgttcctgagcaggaggatgaacctcaggcccaggtcgtagaattctcgctcactatgcctgccaagagaggagcatagcatgcaagtcccagtagaagtaatggaccgggtgttcccggagtcaagggtgtatgtggaatcagttctggctgattgccaaaccctggaagacctggtgaatcacaggatcagcctaagccgtaagatgggcctcaaggttccaggctctccggagtaccgagagctttggctggctgagcaaagtatccatgagattgagggctatgtcctcggctcttgtggtgtaggggcctcccagccccactaggcgttcccggagccgtatggcgggaggggttgaaggttcaccacacgaaccccctacgccccggaggttgccggggtaggtcctccaggctctaaagtcctggagaagtgtcagccggacctttgaggatgggagtccaccggcactcttgacacggcgtactgaacacggtttaataccctccacgaagaaacaggaggtaccatgagaaacatgttcgttacgccccatgccaggaaacgctttcgtgagcggttccggcttcagttccacccctcggtcttcgaggacggtagagacatctacgtcatccggaagcttttcgctgaagcgaaatactgtgattttgagcttcgtatgcggataggaaactataacgcgctctgcgtaaagcacggcagggtcgtaagggtttccaaggttcggaatttcgtattcgttcacgatgactcgacgatatacacaatcctgaaggaagggatggttctgtcaaacgtgaggttttagggtaggggtcttggcgaccaggttggactccaaattcaacccagctcagttcgaatctgagactgcccgccaaaaatctcttgactttatctgaaaatgtggtaaagtggatttaagagattcagatgtgggaccgacgaagctgatgtgcagaggaggtgatccagcatctcccggacgggtccgggttaccaacccgctaatttcatagcccgacagcaagggtagttcctgcggggccagggtccaagtgaccctcctacattccgttcggtccctcaaggtgagggagcttgactgttaatcaagacgtgcctggttcgattccagggagcggagccaaaagagtaacctccacgcataaggccttgcactgcgcaccaggaggttagtttcaacggaggggtggcagagcggtttaatgcaccggactgtaaatccggcgtccgaccgggcatcgctggttcaaatccagccccctccaccaaatgctgtgtaagttggactgttgcagtgaagcgataggctccccggatcgtaagccggtaacgtggggatagagggctcccaccgctgagcaacaggaggttcgattcctcaacacagccccaaaactgctccaggcagttcagctaggctaggcttgagaggtagtagcccgtttttccaaaacctctcacttacaatcaggcgtgtggcgaaaaggtttaacgcactggactttgactccagcatttgtgggttcgaatcccaccacgtctgccaatctacccgatgctaatcgggtcttgtcgctccgggtcagcgactcagaagtgacccttagccccggcgatcttcgctggggctttttactttctcaacccgtaatggaggttgcaaatgacgttccaattcactcccgcacaagcaagcgtgatgtctgacgataagcacagtatcatcctgtacgcctcccacgcaggcggaggtaagtcccacctcgtagccaagtggctcaccgaacccatgcacttggaaggatatcgaggcttggcagcccgaagaaccattccatatcttacgggccctggaggcctggcgcaacagatagtggatgttgacccaactctacggttctttcgaagagatttgatggtaaggactccagatcgcaggtcctcgatagttcttcgaggcatctcaagcgaggaagcccctagaagcctgggaggattcgtatttcaaagggcagcagttgacgaagccaaccaggtagacagcagcgctctgacgtacctattgagcaggctcaggaactcccaatgtcctgagataactccccaggttttgatgacattctctcacggagattattccagcacattcctagacgcccttgtgcgacccttcattgaaaaaggggatagcccaagaggacacggtggggtaggggggattgatcccaagaagagtggtcagaccaggtggctcacctttttacgggggttgccggttgtcgcaaagaaccaggagtctctgatagacctcttggagtgccacacagggaaagagccagaagaagccaacctcatcccatataccctgtacttccagccggacgttcacccggttgtgaaagaactctaccccgagtacgaatctcatctgaaaaccctcgcatcacctttaagtgttcagatgactggctactggggtgacgaatagccccgcatagcggggcttttttgtgcccagggattggccccgggcaatgcaacaaggagcctaccatggcttatgaaatgaccccagaggataaggtcctctacgatgcaatcgctcgaatcggcgtcctgggagctatccaggcaggcctgatgaaggcaggggacggtggggagcctgcaccggcaccgaccgtagataccctggaaggcgctggagccactggtaaggcagtgatgaaagctgcggatgctgctactgcacgaactgctattggagcaggaacctcgaacctggccatcggtaccagtgcaagcactgccaaagcaggcaactggaaacctgcctgggcggatgtcaccggaggcgacgcagccgtttcggcgggtgttaaggctaaggtgaattccgtcgcagcagtggccgaagacgccgagttggcagccgtcactgccaagcttaacgaactgttagctgccctaaaggcataaacagggactgggggcttgacaaagttaagcccctagcatatactgaccatataagcaagagaaactttgagggcttgacaaatgactaagacagtcatcggtcctaagtctccgaagcaggaagcgtttatcaactccactgcgaacatcaccgtgttcggtggagctgccggggctggtaaatcctacctcggagtgatggactttctaaagcatgtgaagcacccgatgttccggggcctgatcactcgacggaccactcctcagattaagggccctggaggtatcttggataactgccttcagttgtacaagcagtttgacaagaaggtcaaatggaaggataaggacgggaaattcgtcttctcctcgggagctgagattcaccttcgacactttgcccacatcgacgataaggacaactaccagggtctggaaatcaacgaatttctcgttgacgaaggacagcaatacaccctggaaatgttgctttacttgatgtctcgtatgcggggtccgaagtgtccagaggttgaacctcacatgaagatcacctgcaaccccgattataacagtccgctgcgtaagtggctgacttggtacctggaccctgagacaggtatcccgctcccagaaagggacggaatcactcggttcttcactatccaaaacggagacatggagttcgctgacacagcggaagagctgattgaaaagtacaatctgaagtctcctcccctgactttcaagttcatttcggcaaacgtctacgacaaccctgtcgtgatggagatcaacccccagtacgttgcctggcttgaaggtttgaacagggtcgagaaacttcgactgctccatggtagctggtttgcccgagaagaggcaagcggctacttcaagcgagaatggactccaatcattccgcttaggcctacggataccgtgcgacaggtaagagcctgggatatcagcggtacgcttccgtcagactccaacaaagagccagactggacagcgggcgtattgatgagcaagggccgtagcacgctatacacaatcgaggatgtggtgagggaccgccgccgtattggtggggtttttgaactgatccttgagacagcaagacatgacggagctgacactacgatcctgattccacgtgatccaggagcggcaggacagcaccttgcatgggactttgttcgccgcctggcagagcacgggttccatgccaggacccgtccaaccaacaaatcaaaggtcacccggttcggcccttttgccagtatggcagaggctggaggtgttcaggtagtagaaggcccctggaacgaggcttacctgacggagctggaggtgtttgatggaagccggaatgttaaggacgaccaggtggatgccacctcggacgcctacacttatttggcatccgacatccacattcccaacttcatccctccggacctgacccgaccaaacccgctggccattgaacgataggaggccctttgtggctcggagaaagaggaacgtcagaaaggcggcagaagtgccatcggccccccgccttcggctgggcgaaatcggacacacgggcctaaagcaaagcggtggtgcaatctacgaggaaactcgggctgagctacggttccccgagaacctgaacaccttcaaggtgatggcccgagacgccaccattgcaagtgccctggcattgttcgaattgatggtaagccgtgtagaatggagtgtcaagggcggtacagagcctgacgctgccatgcaggagaaggttaaattcctctcccaggtcatgcacgatatggaccacacatggtacgacttcatcaaagaggtgaccagttgcttcacttacggcttctcgatccatgagaaggtgtaccggaaacggacgtgggcaaatggctccaagtacaatgacaacaagattggcctgaagcgtctccctgtccgttctcaggagaccatcaggaagtggcggttcagcgaggatggtagggacttcctcggtgctgtgcagtttcccaaactgatcagtggatgggagcagcggtatggaacctatctgaagaacctgcccaacggtggtgatgagattttcatcccgaaagagaagttcctgaacttccgtatcgaccctcgccgtgacaaccccgagggcaatagccctctgaaaaacgtatacttcgcctggagttaccggactgccctggaagagcaggaagccgtaggcattaccagagatatgaatggtatgcctaccctgtacatcccgcctcggtacatgtccccggacgcttccgacgaagagaaggcgatctacgagtattacaagaacgccatgcggaacatcaccatgaatgagcaaacgtcgctcattcttccgcagcagtttgacccggaatctcgcctcccgctgttcaagttcgagctgactagcagccagggcggtaagatgtacgataccgacgcaatcatcaagcgttgggataacaagattctccaggtcctgttcgcagatgttctgaagatgggccaggacaacgttggctcctacagcctggctggtgctaagaccaacctgatggctatggccattgaagcacgtttgcagatgatccgggacgtgctgaacaacgacctggtacctcaactgttccggttaaacggatatcgccccgatgaagagttccccaccttcgagttcggcgacctcgacgagattgacttggatgtttactccaaggcgatccagcgaatgatgtccgttggtggcctagagtttactcgtgatgtggccaaccgaaaccgcaaggccattggcctaccggaacttcctgccactcaagctatcgaccgagaggctctgcccttggcaaacgacagcaaggcaggggaggggatgaagacggcgggtgaagggacttctaagagccccagcgcccgcgatgattcaaccgcaaaccaggataactgaaatggctgaagaaaaccagccgactcccaaagaggacgtggtgaagagtgttgacaaggccgagcgccgggcactctttgtcgtcctggctccggatgaggtggaccttcacggggacatctactccgcagtcgaggtggagaaggcatgcattcagttcaaccggcactgcatgaaagccaacctgttccacgccgtcgagaccgaggctgcccagatcgagcaaagcttcatcaacctggccgacttcgacaccgacgatggacggaccattaccaaagggacgtggtgcgcttggatgcacttcccggaaggtgatgcgctggcagatgacctgtgggcaggggtgctggatggatcgttcaacggcgtcagtatcggcgcccgagcaactgtagaggacctcaccgatgagtgatcgaaaagccaaacgccggctgaccgacatctcttttgaccatgaaggcgctcatctggcgctggtccataagggacaaggtggccctgcgaatgggtatacgaccctggtaaccaaggcacttgacgcgggaatcccgcaagacgtgctgaaagccaccaaggtcaaagtggagctggagttcccggagttcctccggaagttcttcaacatgtactacagcgatgcagagatgttgtctgctgccctggggtacggcaccactgaagggaaagattggcagatggacggagagtcgtaccaagagtacatcgaacgccgcgtaggtggcatcgagattctgaagtccctgtacaagagcgaggaccccgttgccggcttgaataagcttgacgacgcggcaatcgtcagcatcgcgaaagctcgtgacctgctggaaccccatatggccaccgcttctggggccgaccacaccaacaaagaggaaagccctgtgagtcaagaactcatcgacaaagctgtacaggcagccgaagcaaagctgcaagatgaactcaagaagcaagccgacctgctgaaggctgctaccgaacaaatcgccgccatggaagccatccagaaggccgctaaggtagaagctcgtaaggccgctgtagccggttccggtgctgacgctgaagctcaggttgagctgatgaaagccatggaaagcctgagcgatgaaagcttcgctgtcattctcaagcacatcaccaaagcaaaagaagttccggctggtctggaccgtgaagtcggtctgagcggtgcatctgacgctgaaaacgctagccaggtagagaccctcaaggctctgatgctggccaagtacaccaagcaataaggtataggagcccatcatgcccgttatcgctaccgaccatcagcgcctgagcaactggctcaagtacgaatacgacccggcctccggcgtaacccgcgaagtcatgccgaaaacctggctggacccggctgtgaaagagaccggctcggttctggacgctgacggcaagctggtcaccaaggcgaccgctgccaacgctgcctacatcctgatcgattgcgagcaccgcgccgctgctgaccagtttactcaggtcctgcttctggcacgtggctacgccaagatcgccgacgaaggtgtgatctttgcggacgatgtagaagccgcagacaaagaaaccgctttcgcagaactggcgaagaagaacatcttcgctgtacaccaggtataaggaaggaaccatgcgaccgattccctcgcttcagaacaacttcgaatacaccgacctgaccgaaccgatgatcctgatcccgaacgtgtggggtctgacccaacagctcggcgtcttcggtgttgaccgtaccacccaagagtccgtgactctggaagaaattaccaagtcgttcggcctgatggaagatatccatcgtggcgctcgccaccaggttggtcgtgactatgatcgtcaaatgcgcaccttcgcggttccgcacttcacctacgacgattacatcaccccgcgtgatatccagggcaagcgtgcctacggcaagcaagagctggaaaccctggaccaggttcgtatgcgcaagctggagcgtctgcgtggcactcacgccgctaccatggagtttgctcgtatgcacaccctggttaccggcaagccctacacccccaacaacaccgttggtggtgctaccggttacgactggtaccaagagttcggtaagacccgtttcgaagtcaacttcgagctggacaccccgaccaccaacatcctggagaagagcgagctggtttacgctcacatgcaggacgaggcctacactggcggcgtagttggcgatgttatcgctatctgctctccggagttcttcagcaagctgatcagccacccgaccgtggttgaggcgtacaaatactacgccagccagccgcagattctccgtgaacgcctgcgtgcccgtggcttcgacgcccgttaccgtgagttctacttcggcaacgtgctgtacatcgagtaccgtggtggcttccaaggccgtccgggtggcgagaagcgccgttacgttccggctggtgaagctgtcttcatccccggcagcggcaccgaagacctgttcaagaccttcttcgctccggcgagcaagttcgaacacgtcaacacccccggcgaagaaagctacgcgttcgagtacgtggacccgaaaggtgagttcctggagattaactccgagaccaacttcatcaacgtcctgatgtacccgcaactggtcgtgaaaggcaaagcggcctaagaaaacgggggccttcgggcccccttttttggtcccgagaaaaggagtaggatatgccctacacaggcgatccgaagaacaatgtggtcgatcagctccgcctgatggtgggggatatctgggacgacattgaaatcttgacggacgaagattaccaatattttatcgacatgtacaatggcaacatccgcagggctttcctggacgttgtacggtcaatcctcttcaagctggcccgttacgtcagggaacggactggtgatattgaggtctacggaagcgactggtggaaggcctataggcaaactctccaggatatcctgaaggacccgaacctgacaaccgtgattgctctgccttacgttggtggtgtgtcagccaaagatatggccatgaacaacgccaatccagacaatgtggcacggaagattttcatcggattcaatcgagatttgcggctttacgagcagcagaacgtggggtacaatgacatgccgagaatcgggaaggccctagatgcccagccgaatctctgctgactttcggaagctagacgctctgattgcccggatggaggccttggacggtctgacgctggagggaggcttcttccctgaagaccggtacggtccagagaatggtaacctcccagtcgcccaggtggccgcctacaacgttttcggtacggaaaccaacccggaacgagacttcatgactcccagcttcagtgactgggccacggtgaactactaccggaaagccatgaagcaggtggtagaggctaccattcgagatgggcgaacccagaagggtcagctcaacaagatgggccggaccatggtggagattatccaggtcaacattgacgacttcccaggccataacagcgctcgctgggctcaggtgaaaggctttgacgaccccctgactcatacgggcaagatgcaggatagcgtcaagtacaagatcgtgaggaggaagtgatgctcacgccacccatgctaagcactcacttcgtcaagaacgaggtgattcgccggcccaggaagcgcctggtccgaggacggcctgttcaagaccctccggagatttacattgtcgagggaagcttccagcctgtgctgaaaagcacggacacgatgcaactccccgagggtgaacggaccaagaaggctttgaaggtttataccaggaaccacaccaccctgcgagaagccaacgaggctgaggatggctgggatgcggaccagttctggtggaagggcgagctgtacgaagtcgtgaagaccgcttcctacgacatgagggtcctggatcacgtcaaagccatgtgtgttcgtgtggagggtacctgatggccctgaccatggacgagctgagggcgaaataccccggcatagaggacatttacacccagttggaagatgccctctacaacgtggctgaggctgctttgggggatttccctctggtgctaagctactgtgataaccaacagacccagacgcctgcactgtacatcgagccgatggacatcaaatcggtattcaccgagcaggtagcaggcactctggagattgacccaacagacccagagagggctgtgcaagaggtcaccaagtggtacacccttaaagcccgttttacaggcctggggagtccacacaaccacgccatggcagcggcagcagtccagcatttggaattcttcctcagcactgaggagggttaccaggctttggaatccaacgggttttcaaagaatggggccaatccaattcgtcggatcagggatcaacgtcccaatgagctgtaccagcatttccggtacgatgttcatttgtcctacgccataacacggaaagaagaggtgacctggatcgaagctttggagctggacgcggtttacaccaacgccggacgagagcctgaccacgttatcaagaaccatatctcactcaacgaggaaccctgaagatgacccgtcttaccgacatcatccagatcaccattgatcggcaaacgcagccggtagccaccactgcgttcaacgtgccgatgttcctggctacccactccaacttctccgagcgggcgcgggaatatgcatcgacggaagctgtcatggcagacttcccgaacaatagctccgtaatgcaggcagctcgtatggccttcgcacagaacccgcgccccaaccgcctggttgttggtcgccgcaacgtgccaggcgccactgtctccattgtagaggttgcaccgcagaccacctacaccatgaccctgaacggtattccggtgagctacctgtcgaaaccggaacctgtggatgaagatgacgagccggcagacacggcagtaaccatctgcgcaggcctggtagcagctttcaacgtcagcccggtcgttggcatcactctgaccgacaataccgacggtaccatcaccgttcgcagctccagcacctcctggtcgctgactacctcggcaaacctgtcgaagtcgaacatgccgtccaccgagggctggggtgccgctatcctggcagtaagcgctgcgaacagcaagtggtacggtgctaccatcgaatctcacgtcccggcagatgtcctggaagtggctgctaccatcgagtcgatgagtgcgaagaaaatcttcggtacctctaccagctccgtggctgtgaagaacgccactgctggcaacatcctggaaaccctgagcaaggcaggctaccatcgtaccttcctgctttggaatggtcgagctgaccaggacttcccggagctgggttggatgtcgagccaactgcaagagcagccgggcagcaacacctggagcttcaagggcatcgctggagctacctacgatgagctggacgaccaagagtcggcaaacatccacgaccacaagggtaacacctacgagttcgttggggatgccaacagcaccacgttcggtagcatggtgtctggcgagtggatcgacaccatggtaggcatcgactggtttgaagctcgcctccgggagcgcctgtggttccgtcagcggaacagcaagaaaatcccgtacaccaagcagggtaccaccatccttgaaacggatgttcgagcacagctccaagagggcattcgagtccaactgttcaccgacaccccggctccccgggtccgtgtacgggatgcaaacagtatgtctccgaatgatcgggctcgccggttctatgacggtatcgagttcgaagctcagctcgctggtgccatccacatcatcggtatccgtggcgtagtcacggcttaaggagtagacaatggcaggccgtacttccacttacgcccctaaccaggttactatcgtaatcaaccacgcggcttcgggtatcagccacaccctgaccggcttcagcgaagacagcattgtctccgttgaacgcctggtggacacgttcaccgagtatgttggtgctgatgacactcacacccgggtgttcaacgccaactccggcgcacgggctaccgtaagcctggcccagacctcggagtcgaacgatgttcttaccttccttcacgagtttgaccgtgaagcgatgtccgcagacggcatgttcgagatgctgatcaaggacaactcgggccgctccctgtacttctcggacgaggcgtacattgcagtgatcccgcagggtggcttcagcaaccagatgaacacccgtgattgggtcatttccatgaccaacaccacgttccaacatggcggcaaccagaaggtgagccccgctaccgcagacaccctcacggctcttggtgtgaacctcgacgcccgctggctgtaagcgacaacctggccgcccctcgtgggcggccttttttgtacctggaggaaatatgaacaccttgacttactctccaagagaggttacgatcctgatcgccggagcccatgaagtgaccggatacgcggagggggagttcgtcacgatccagaaagaggttcaagcgacccagactcagcgagctatggatggatcagtggcccgcctctacactaaggatgacggctaccgaatgaccctcaccttggcacagtcctcgcctacaaacgacttcctgggcgctgtttacaacctggacgcagctacccgcaaggggaagttcccgctagtggtgaaagacaccctgggaaacacaaacttcttcgcaggcactgcctggattgagacccctccgaccgtagggtttgggggtactcttcgagaaaacgtgtggcgattcgcttgctacgacgctaccctccggatcggcgggaacagcgaccttactgacttcgagaactacctgagtcagggcgcagccatccttccaatccttcgacagtacggacttatctgatgacaaagcgtgtgttgacttacgcccccgaggatgttagactgataatctcggagtttgaatgcgtaggtgtagtctcggttgaggttgtctgggacatggaggtctaccgtaaagtggtgggcatccggggtcaggtgacccgagttcgaaacctcaaccagtctgcacgtatgcgagtagagcttcttcagacctcggacacaaacgatgtcttgttcgacatcctgacacaggaccgcgttaaccagtccggcaggctagatctggccctggctgacaacaacggtgataccatcatctacaccaacaatgcctggatttcaggccatccccagacccgtaggagcctggggtttgacaaccctgtgtggacgattgagattgcccgagtaacggaccgtgatctgtctggttcgaacaaccccctagacttcttcagcttcgacgggctgaagacggctgcgggtaatgcaatcaactcggtcttagaccaattctaaaaggagagcccaaatggcacgcaagcaacattccatcgaaatcaacggtgaccgtttcctgatcacctccatgccggctaccactggcctgtctcacctgaagatgctcaccaagcttctcggcccggcccttgcagaggcaggcgtaggctcgaaagagggtgcaggttcgatggacatcgccaccctggtcagcaaggtggttgagcggatcgacgaggttgaggtggaaaagatgatcatcggcatgatgaccagtgtgtccaagaacaacatggaaatcaacttcaacgaggagttctcggctgactttggcaagctgttccagttggtgactgaggtagtgaagctgaacttcggctcggtttttcaagcactcggtttcgacggtcaacagtaagtggggaggggggtgaccagatggtacacccccgcctaaagcggctcatgaaggagttccaaaaggactacgaggtctatcaggtgttgacgcactctctgcgcctggcgagccttcacgagctgcaaacgctgtacgataccgaggatttatatgacctcctagagtaccaggcagctcacgacgaagccgcagacatcgcccgagaaatcgccaagctgaggcaacaagatggcaactgaagagattacaaagctcgtcgggacgatccagtggagggcggataaccgccccctgctgacgttcaagaagaacctggaacaggtcagagaccgcctcaacgaagtggctggcctggccaacaagaaagtgacgatgagggttgaccttgatggtcgaagcctggcagccaagatcaaaatggctaccaatgcccagattcgtctcaagaatgtggacatcgcccaggacaccctgggaacgatggtcaagaagctcagtgagcgactggcaaacactccagtcacgctgagcaatgttcgtttcaacatcaaggatatcgcccaacagaagcgattccttcgcacgtttatgcaaggcttggctctggaaattcccgtctctattcgagcgaggaaggcagagcaagccctgttggcatggaagcggcagactgagcaacgcttcacgcttcacctaaatgccgacatcagtcagtccaagttctaccgaaatgctcgtcggaccatcgacgcagtgattcagaggctaggcactatcactctgcggacgccaaatatcaggctgtcggttgacagggctcacctccggcaggagattgcggatgtcctggcccagattcgccgagaggctagaattagaatcgatttgcaaggccatgtcaaccaggtaaggggtaggaatgcccatgctgtgggaggtatggctggtgctggtgcaggggctgctgtagcccactggggacgaggctttatccctggcctgggaggcgcgtttgccatctcccagatgaaccagatgggtcagcaaatgatcgcccagcagaacgccatggctgcggtaggtggtagccaggaagctggtcaagccactatggcacagttcaagcagatggccaacgaggtcggcttcgactggcgagctgttgcaccttcctacaccaagatgctggcctctggacagggcgccggaatggacaaagatgttgttgacagcatcttccgttccatgacagagtatggtaccgtaatgggcttggataccgagtccatgaaaggttctttgcgcgccgtcgaacagatgatgaacaaagaacaggtgatgtctgaggaactgaagctccagttgggtgaacggttcccggcagctatgagcctcatggcccaggctgtttctgcgaaagaaggcagagagattagcaccaaagaactcggtgatatgatggcgaaggggttggtccgaacggacgtgcttcccgagttcgctcgtatcattgccgagaaggcccgagaaggcggtgcgttgtccagggcgcagaactccactgctgcccaacagcagcgctttaacaacgcctggtcggacgctgtggggctgatctacaacaacggcatgggccagggcatggccaacctgttcaaggagatggctcggacgctgaacgataacgaggaggctgtaaaaggcctgggtgctgcgatggagtggctcctttccccgtttgaggcagccgctatcttgattcgtcagatgctgcaacaactacccgacctggccagcaagctgggactgacatctggacagttgatggctttggctggagctatcggccttgcgctattcccgttggggcagattgccttggctattggcggcctgttcctggtggtcgaggatttcgtcggcttcctgcaagggaaggatagcgtaattggcgacttcttcaaccaactgacgccagagcagcaagctgtgtggctgaagatcggtggggcagtagtccagacagcagaggcggttggtcgcctggctgaagccatgggagagctgctgggagggttcgctgagggtggtatgttctccactgcgctggacttcttcacgtcgaagattctggccgtgctgacagtcatcaccaagctggttcaggctgctgaagccctgaagaataaggattttggcaaggctgcgaagcttgctggagacgccggggccgtagcgctgtcgaacagcccggtaaccatgctcctccgtgatgacctccggcaggaccttgaggcccgagcccgacgtgctcagaatgacatggggcggaacatagatgaagacgttgttcgccgagtccctgagtacctcaaagcggagaacggggtgggtggtatgcccagtgtagggcagattaccctgaacatccccatccagattgagagcgctcctcaaatccaggatgaaaaggagttcagcgagatgcttcaaacccgaatcatggacagcttccatgacactcttcgccaggccatggtggatgcatcggagaacaagaaatgacggtagctattcaacgagagtccggggatatcatctggttcgatgcgattctgaacctgaacatctcccgggctaaccaggtgactcagcacgtggtagaatcgggagcttcggttaccgaccatgtgattgctcagaatcagaagatgaccctttcgggggtcgtctctgacgctgacttcaacctggacaggccagttattacggctgctgacgcacaggctttcgggatcacccctaagccttttgtcaatagtacgccagtgacatcaggacccatcatcaccccgggagctgacacggcctggacgaacttcctcccggagacggtcaaccagttcttggacttggacagacctaccgtggtggtcccagcagctcccaaggagaagggggcaaacctgatccgagaagaactggacaggatcaccagggaccgtgagaggattgtcctgctggacttcgaaggctctgctgtgaggaccatcttccagaacgtggtgatcacctcgatcagcttcaaggaagacccgcagagcggtgagtcgttgtatgtggacctggcatttgaggtgatcaggacaaccaccttccagacggcagccattcccaagaaggtgagcgattcgatcaagaacaaggccagcgagaagcaggccaagggcaagcaagccccgaaagatgagaaggtaacggatgcagacgggaagaacccgaaaggggaaaccgtattgcacaggatgactaaccgggaggtgcgatagtggctatccgagagcgggccaggctggtggagctacccacttaccgagacccacaatacgcctaccaaatgaagctgggggaccaaatccggtacctcagcttttcttggtcggataggcaacgatattggcacatgaccgtagaaaacatggacggagaggttatcattcggaacatgaagttggttccgaactaccctctaggctatgactacggatgggccaggtacgggctgaacgggtatttcctagttctccccgacaaccacaagaacgacatctgtgaagatatctctactctcaacgagttcttcgaactgtactacgtggagattgaggaatacgacgatagcgaggaggtgtaaatggaacagttcgaacgggtgtacttgctcaccgttggagattaccggacaggcaagggagtcctgatcaaggatgtacacatgcggttcgacatcagcaagtcggcagacaacaagaagaagtccaacagtgccacggtcgaactgtacaacctctcagcaagcacccgagcaatgcttgatacggactatttgtcggtcaaactggaagtagggtatacggcagccggaacccgggtggtactggagggcaacgtggttgaacgccggacagcccagcagggcccggacatggtgactcagctcatcctgggtgaggggtacaccgacctaaaccacatccggctcaagcagacgattcctccggggcagactgccaaggatgtcattgaagctgctatggggcaacttcccggcgtggtacggggtgttttttcagggaccaacatcaacaaccccgtggtgttcgggtatcccatggacgggagtgcaaaggaaatcttgaacgacatttgcagggacaacaatatggagtggcggtgtgatgcaggcgccctctacgtcaatgatgtcaacgggattcacgacaaaaacatcaagtcggccccggtactgaacgaatctaccggcctgatcggcatcccctaccggacatcctctgaaggtaaccggcagaagggagacaagaggcggacgcaaggggttcaattcaaagccctgttgaacgccgactttgctcctgggcaagtggtccgtatcgagtcaaaagaagtgacaggctggtatcggatcaactcagccaggtactacgggggctacgatgacaaggaatggtacgttgattgcttctgtggcatcattatcgaggaagacctcagatgattgaactaagtttcagcagcgtggtgaacacgctgatcgagcaacaactgaacaatgtgagaacagccatcccgggaagggtcatccgagtctacaaagacctggagacgctgatgattgatgctcagcccctagttaaccggctgtacgatgacgggacttcagaggagcagcctaccattctttctgtacctgtgcaaatgccgggaactcgaaggaccttggtcagcttccccttgttccccggagatgaggttctactggtcttctgcgagcgaggcattgataactttaaagccggtaccgggaaccccaccaagcccacggggtctcgaactttcagtggacgtgatgctgtggctattcctggggtcttccccttcgcagtcagccccaataaccctgcacacaggaagtttcctcacagcacctacgacctggtggtagcccacaacctggccaccgcaactgagtgcgaggtgaggctgaaggagaatgggaacatcgaactcctgacggacctagacgtgaacgtcaaggcccggaacatcaccttggaagggtcagaagggattaccctgaacacaccggccctgaaagtccaggcacagaataccacctggacagggaacatcacccactctggaaactacacccagacaggtgtatcgacattcaacggcattccgttccacacccacgtgcatggaggggttatgcctggcggtggtactactgccgtcccacaagcgtgagggattatggaccttctactggatgaaaatagtcacgacatcgtgttcgtgaatgggcaaacccctgtgactcaggggcaagtccagattgtagctcaaaggctcaaaatcaagctctggacgttcctgggtgagtggttcttgaacctggacgtaggggtgccctaccgccaaagaatcctcaccaaggtggcccacaaggcgacggtggacatcatctttcaacgcctcttggctgaggatgagggggtgaaggaaatcctggaatatcgaagcgaatacaacgcgcccgctcggcgcttcaccttagaattcaaagtgcggacttactccaacgaagaagtagccgtgcgtctgccgctggaggtataaatggctggattgactgacaaagggctggaaatccggtaccttcctgaggtactggagcagtaccacaaccgagcccaggacatcttctctgacgaagttgaacctggtgatgtagtggataccagtgagaactctgccctgggccgtatgattggcgtagtagccccaagtgtggctgagctgtgggaagccctgcaagaggtgcatgacagtttcaaccccaacgtggcaaccggctacgctctggataacgaagttgctctctcgggtatcatccgatacgctgaagagcccaccagggctcaagtagtgtttgagggtaactacaacatcgtggtcagctcggtgggctctgtatcctccagcgtcaccttgaggcagttccgggtgattaccccggtattgatgaaccttcaacaggcttcaggggtagcctggagggtcacggctgttgaagctggacacgagtataagatcggttactcgacggatggtggcagcaactttgtatatgccacgtacaccgcgacacccacggacactgcaacgtctattcagaccatgctgggtcaaaaggtatcgcagtcgtggaccagcttcgaaacacagactgatgccaagaacaactacaactgggctcgtcgcaggaatcgtctccagattgtccacttcgacctggacccccgcatcaccccaatcaaggtggccaaaccaggggtagtagaggatacccaaatggggccatcgactcaacttccagggacgattgacaccatctcggtgccgatcctgggctgggattcggtgtacaacccaaccaacgccgtatccggcaggttcagggagacggatgtcgaactccgggaacggtggaggaattctaagttctaccaggccgctgccatcttggaagcgatgctggacggcatgcaccaggttcctggggtgcgggatgtgaccatcattgagaatgacaccaacaaccatgactcggtgcataacgttcctccccacgccttcacggtgatcactcatgggggtgacgactctgacatcggcaagatgatttggcagaagaagcctacaggtatccaagccttcggggatacggtggtgcagattgcggactcccagggcaaggttcactccattggattccgcagagccaaagagattgaggtacaggtcaacctaaacatctctgccattgcaggtcaggttcttcccggggatgtaaaggagcaggtcactgctgccatcctggcgtaccaagatgggctggacaaaattggtaaagaggtggtatactctagactatacactccgattaacagcgttccagggttccaggttaacagcttgaccattggaaagaaagggggcacccaggccatggcgaacatccctgtagggtatgacgaggtggctattttcgatgctacccgtattgcaatcacggtgacctgatatgctggaaaagaaccagttccggatgattgactttctgaaagtcgctcaaagccggtacacagagcaattcaagaagaagccgatcttcgataagttcgtagagctgcttcttcaggctcaaattgaactgcaagaggttatgcgccaggtccagcaagagcggaccctggacacagcagtaggggctcaattggacgttctgggggagattgtaggtctcccccggagtcttgtcactgccgagatattcaaattcttcggctacaaagaccgtcctgacaacccaaccccgctaccgaccccgggcaacgctggaccttacggttctttgaacgacccttcagtcggggcaccttggtggggtttggggcaagctactgagatttcccgggaggcaacggacgaagagtaccgcctgatgatcaaggcgaagattctgaagaaccggacgctatctaccccggaggatgtgatcgaagcctacaagttcctgtttggggctagccagatcatcatcgacgaactgggaaacgccaactgccgtatcggcatcgggaagattctttctaccgtggaaagaggtttgctgttcgagctgggcaacgtggctagcctgttgccgaagaccttgggtgtgaactacacctactcggaattctctgctgaccgcccgtttgccactgaaggcttccagggagggtttggcacaggtgacctgaacgacccctcggtaggtggtattctgtcgaaccttctaacgtaagagagcaaaatggccaatatcaacaagatcagtatgaacctgatttggggcgtctctggtgatatcaccgccccaggtccggaaaagatgaacaagggctgggaggtggaggtagttccccggcaatggttgaactatctgcaaaaccggttggacaccaacgtggcctacctgctccagaagggcttgcctgagtgggacagtgagaccgagtatcaggcaaacacctcctatgtacaacgcaacggtgtagtgtacaaggcctctcggacaaataccaacagtgagcctggcacgactgcgggaaacaccaactggaaccgggctttccaagagtggtctccagctctggagtccctgacggcgcttacccccactgcgtggaggttcccgttctacaatgcttcaggacaagcaaccctgggtggaatcacctcctacactgtagggctcatgggccttagctccgatgcagcctggcgggcagagctgaaagctcaaacgagtgcttcccagctcacttggctgtccaacctgacacctgtggctggagctatcccgtatttcaacacggctacctccatggccaacctggcaacgaccccgtttggtcgaaactggatcggcgtagcagatgccgcaacgggtaggtcgcagcttcaactcggcagcgctgctgtcatgacggccacggctattaatcaggcgagcacagttgttgccagggattctacaggaactgccgccatcgggacggtgattggtagcctgaccggtaacgcttcaactgcgactcgactgcaaaccgggagaaacatcaacggtgtcctttttgacggaacccaggatatcacgctcccacctctgacagccgattacgcaggtacagtggcccgcctccacatcaacggggcgaacatgtcagggactgataaaacaacccagttggcactccgaaacaagtctaacacggattggatcagtctggctgtaatagaagataacatccttcagtttgctttccgaaacacttcgaaccccatcgtacagattgggggagaagtcgttctccacacagggaaccagttctcccttggaccaaccctaagcgatgcccgtagtcgtctaggacttgaccgagtgtcccaagggtcatccgataccgtggtattcgctagcacgttgaataacggtccgtatttgaccgtccaaccttcctctgttggaggttttaatgggggaacgcagacttggatgttccgattcgatgaaactgggacactgacccacgggacggtaccagttgcaagagtgtccggcctggcaaactctgctcagattcctgccgtaactactgcccagtctaactccttggttcaaagggattcaagcgggagctttagtgcggtaagcatcaacgcctacggaagcattgtcgggtatggatcgaacattttcagccgctcctctggtacagggaatgcccacatcggtttccagaaggcagatgggagtgagttgggcctgatttggggtgctccgtccaacgggtccatgaacttccggacgctgggtggctcgacaggcatgactcttacaggtcaagacttgactgtagttggaagggtcaacgcagccacgctcaacgcctccggaaacgctaacgtttcaggcaacgtgaacgtgggaagtgctaccctcaatacggcaggtaacatcacgggtcctgcctacggggcgtacaattccctgaccaactgggtggattcggtatatgccaagaagggtgagattcctaacgacattgcccgagctggagcagcctgggacgccgtagggcagtacatcctggcaggagaccagtcaggcgggtcgggggcccctggcaccattagggcagggagccaactgaaaccgtactctaccatcagttacaccgcaggggcacttccggcagccgggcagtaccgttgcatgggagcgtttgcagggggtggtaaccagatcaccctgtggcaacgcatttcctaaccaacaaggggcttcggccccttacttctacctggaaggtgaggatgaaattcagaaacgttgtaaagtataagatggggtatgagtgtgagattaaacacccggaatgggggtggtcaccgtacttcgcctgtgactacgacgagaatgcgaaaaagatttatgacgccattgtgtctgccattgaggcgggtgacatcccagtcccggaagatgtgtctgaccgggatttggccattgatgcccgtaactggagagataatgaactacgagatgcagatcgtcaagtagaaatggccatagacgatgaagatgcggtaaaagagaaggcctggcgaaagtatcgctcagctctgagaaagtggcctgaaaaggcgggattcccttccgcaaagagccgcccgcgccgccccaagaattgaggaaagattatgccgcttccaaaacctgacgacctgtccgtgatctgggcatctattgggcaggcgaccaagcctgctccaaacaagatcatgacaggttggaccaacgaaatccctccctaccagtggcacaactggtatttccagagggtagataaggccctggctcacattaaccagcaaggcatcgccatgtgggatgctgccaccacttacgaagggggcaccagcctggccaaagggtcagacggaatggtgtacaaggccaaacggtccagccgaggtgttgacccagtatctccggcaagcaacctggactgggaacccgcattcgagaggtacggtgaggctgcgaaagtaaattctcagcttcaatccttgaaaaaggattatgaaacactggccaatatcagcaacattgccatggccaggcaaaacctctcggtatattccaaagccgagacggatgtccgatatgccttcaaggctggggcagccgggcaggtgtttgctgtagcccctgccaccgcagggagccatgcagtaccaagggatcagttgccatccttgtacccccaagcaggcgcggcgccgggtattatcgccctggcaagccaagcggaaggatacgcaggcaccgttgagaacaaggcgattgcaccgagtgtcctgaaagcacttaccctgtataagagccagaatctggcggacctcccggataagcagcttgcccgggcgaacctgggcctggccagctctgctgtgttgccggaaaacacctggttgaaaactgctagcaacctggctgatgtccccaacaaagccgcagcccgtgccaacttggggatcacgtcttcagcgctcctccccgagagcacctggttgaaaactgctagcaacctggctgatgttcctaacaagcccgcagcacgggctaacctggagatcacagacactgctacgctgccggttggcgacgtgatgcgtaagagtcagaacctggcagggttgaccaacgttcctcaagcccgtgccaacttgggtttggggactatggcaactgccaactcgggagacttcctaacctcggcgaacaaccttggagatgtcagggatgcacaagcagcccggaacaacctgggcttgaaaggatgtgctactctggacgctctgggtctaccgaacggagcaactggcctagacttccaatcggaacaatcctccagtgcatccggctgggcagctcttccgaacgggttgatccttcagtgggggcaagggcctgcattgtacgatgatcggtctacgattgtacggctgccacgcccggctcgaatcctgaacgtgagcgtaactgtgatgggcactttcaacgcctctatcgggccaggcgcctacatgacggaccagtggagtaatactcagttccgggtatcgtgcaactggggcaactgggcgtatccgttctgctggttcgctatcaccaccatctacgggatgtagtatgatcaccaacagagagtatcagcaagctgctgagatgttgggggtagatgtcccagcaatcaaggcagtgaccaaggtggaggccccggtagggggcttccagcctacaggagagccaacgatcctctacgagcgtcaccagatgtaccgacagctccaggccaaagggctcccaacggaaggtcatcccccagacctggtaaataaggtagctggtgggtatggaaaatacagcgagcaacacgctaaactggcccgcgccgtaaagatcgacagggacagcgccctggagtcctgctcctgggggatgttccagatcatgggctaccactggaagctgatggggtaccctacccttcaagctttcgtaaacgccatgtacgccagcgaaggagcccagatggacgccttctgccggttcatcaaggcacaacccaccacgcatgctgccttgaaagcccatgattgggccaagtttgccagactgtacaacggtccaggctacgccaagaacaagtatgacgtgaaattggagaaagcatatgctgaagctagtggctgaaaaggccaagctgcaccgtagcagtacagtggtgctgagcatcttcctcttcatcctctcgatgctgatcatcttcgagccgctgatcccagggcttgcaggtgttctcggtcccgacctgtaccccaaggtcgtggcaggcgtctccatgctgattgcagcaggccggtacatcgtccaaacctccctccggggcatggtagttcaagtatcggatgagattcccaaggaggaagaggaaaaatgaaattgatgactgccatgcggatagcgttggtagtcctcgttctggggctctcctggcttctccgggagagtcatcagaaaatcgacaggctggagcagagcctggcttctctggaggccagctacgcagaagcatcggcatcgtaccgatccttccgaaagcaatgtctgtccgtgttctcaatgaacgaggaactggtgattcaaaacaagaccctggaggcctctgtgggctccgtggtacaacgtttggatcggacccctacactgaccctacccgaggtgaaagatgcgcctacgagcgttcctgggcatgtggctgctgagcgtctctctcctgggactatggagttgctcaacgaagccttctgtgccgcagcccccgcaggtcatcctgcctgtgctcccaaatgagtggacaaccccctgcgtaatcttcccggtggaagaggacacggtaaaggacttggccaaggggtacgtcctgaacactggtgcagcaggttgcgccaacaacaaactccacttcatccagcagtggtacaaagacctggaggcccagtatggcagccgcacgcagtaacaacgaagactcccagtggaagtatgtactggacctggcagcaaagttcctcctacccctgctgatggcatgggccacctggcaacagacgcagatcggtaaggtggaggataggctgtatgccctccaagctgttgctgtgaccgagcaaaaactggttgccacggaaagccgtatcctgaactacctggatgttcggctaggggacctggacaagaagatggaggtcaatcagaaatactccgaaatgatcatccagatgatgaagcaggagcggtaaacgagaggtgtcctcatgacgaaggcccacgaaatcaccgtcctggggatgctcttcgctacactgctgactctggtggtcggtttgggagttctggtctactacgctcaacgggtgaccagcaccgagtaccagttcgacatcatccggaaggagtaccggctcagcctggaagagatgcggcgagacttcgatatccgaacaaacagactgcaagagcaaatcaatgccatgcagtataccacgtctaagcagatgcggctgcttcaagaagagcaggacaacctcaagcggaaaagatgagccccactggccacaagctggtggggctttttcacgcccggagaaaagtagttgacatcccccacaacaccctatacagtggccacatcaacagcttgaggaggttccatggataaggtttacatcgacgcaacatttgacattgaatcggtgatcgccgagccggatgggatagtgtactcggactaccacaaagggactcccttaggagtaaccgccactctccgtgtgaacatgcccaaacgggattccaacagggtgtggaagactctcttggccatggatttctcggccctggagcagcgtgtattggcagccatgctgacttctggagggttggttatgcttctagaggatggtaagctgtacgatcagaacggcgcccaggtagaggacccccgtgataagctcgtggtgatcttcgatgagtgggacaagctttccaagaatcagcgccaccttcgcgccaagaagcaccgtacagcccccaagaaccctcaactgcgaaagaatcactggaaccgttgacacaggaatataaaggaggaacaatgaagaacagtacagcagcccttggactggcatgtgctctggcgacgatgctcaccctgccatccccgtaccctgctacgctgaacagccggtgggaggttgaagtcccagcccaggaggaatcgaccgacaagaagaaggccaagaaaaagaaactgaaggcccttcaagctgaggctgttaagtcgcgtaagggaggtaagaagtgaccgaacccattaacccgcctccgacagtggagtatgttcgaacgactcggaaggcccctccaccgcctcctccaggccctgctgtgaggtgggtgaaagaagggacgactttggatgaactagcgagggatttgaaattgcaacatatgaaagcatggtctgtcgtggttttagcagttatcctggcactcaccatgatgttttccttcctgggcatgatgcagcgcttggaagagaaccaagtgaagctcgaatctgagaaggtgcaagccgtgaaagaggcaatcaccaaatgcgaggcgggagctggagtgttggaagtgactctgaaaggagaccggctgactttctacacttgcaagttctcgaagtagctgttatgattccagacctcaaggaggcttaccagaaagcctccaagaggactaagctgttgatactggcggccctggttagccaagcagcgatagccctctacgaacaagatcgaaggtctttaaaagacccccacctgtccaggatgtgtttcgtacaacaaggggtttttgaagttacccgaacaggccctatcacccgaatctattgcaagaaaggagagtaaagatggtaattttcactaaagaacggaacaacttggccaacagtgagatgatcgctatcaacgccaaacacgtcactgctctggaaatcccagcgtcgaaggaggaaatccgggtaggcctcacaagcggggttattatcctggacttcctcaccgcccaggatgctaaacaagccttcgaaactctgactttcgcctgctaaggaggtaccaatggaactcgacatccgccaacccaacccgcccttcgataccatccggattgcggatatcagcgatgatatgagcaatgtgtgcctgatcacgtgcaaagaggcccctcccggagctgtgcgcttggtgtaccccgatgaaggacaagctacatttggaatgccgggagatatcgtgcaacaagagcttctggtggaggacaagatgcacgccgacttccttatcaaggcgctggaaaaggctatcgagttggggtggctgaagtgatgggactgccgatctacctaagcgttagcgtctaccacttggcaggccttatcgcagtcgcctgcctggtctactggggtatcatcaagatgacccggagcgaggttgaacgaggaaacatgaccaagccgcaagcgtcctggtggcgtaagtggtaccccgtgtgggctatcgtctgcatctcggtctcgtgcctgggcttcggctacaaggtggaagagattcgcccggtgggcacgttccaatcccatcccacaactgttgacacaggggagaaggaggagtatcgtgcataccgtgaaaaggcagaagagcggttcaacaagacccttgaagccatcgaaacgaaaaacaacctgaagtaaggaggaaagatgttcaagaacctgatgcgtggcgtcgccattgtcctggccctggccctggttgcaggctgctctgatgtggtaccgcctgccatgaaaggcaagcacctcagcggtagtggctacagcaccaatgtcctcgaacctggccgtcactggcgtgccccgtggactcgcatcgtgatgctggatgtctccacccagaccgtcgccgagcccctgaaagtgaagatggccgacaatctggacctgacgttcgtggtacgcttccgtactcgaatcgcaggcaccgagcgaaccatcaatgccatgttcaacgatatccgggtggagaatgaccgagtaactctccagcaggtgtatggagtctacggtaaggatgtggtacaacgtgtcagccgctcggtcctgggcaagtaccgcacccaggatgtggcagccaacttcgacaagatcaaccaagccctacactcccaactggtagcagcaatggagggtagccctttggaggtgagcaacatcacactggctgacctgcaatacccggaagtgatcacgaaggctatcgaagctcagaacgagcgagagctggctatcaagaccgccgagaacgaacaagctatcgagatggtcaagcgtgagaactccctgaagctggcccaagcggatcgtgaaatcgaactgaccaaggcacgtactctggctgaccagaacgaaatcacgaaccgtggcctgtcggagcggctgctccagtacaaggcgctggaagtccagatggaaatgaccaagaattcctctgcggtgttcgtaccctacgaggctctgaccagccccggcttccagaaccgcgtctacaagtgaccaacaggggccagccaggctggccccatttcttttgaaggaggatgtatggaacataaagcgttggaaggtgttaaacacagaacgtgggaagtggtggatagcgagtttgacggagtttacatccgagaagccctccctaaagtgaagggtggatacctgatcgagtacgtgattgcctctgatgttaaggaagagcatgctgctaccatgtgtgctgctcgggagctgaaagcggagctggagcgcctgtgccggatgagtgagtccagctttatcctcttgggctgggaagaaaaggacattgaaagcgtcctcgctcccgcaaaagcagccctggccttggccaacaaaaactgggagaagtgagatggacgtgatggacgacggttttgagttccctgatatcctgccggagtgggctgaagagtttcatccctcggaaggaaagcaccagataggggcccagttggcgactaaggatggacgagttaccgggaatggggtgatcttctgtgctgtgccgtggaaactctgccccgagctgtatctcttcctcgtggtgacggatgcaggaaacgtcctcacgttgactgaggctgagttgaacagcctcttccactggccgcaatatatcgctgacctcaaccaaccgactccggctgaggttatgtacacggtcaagacgggcctaatcgcagaccttattcaagacttcaaggaggcaaacggacatgcgtaaactagcttcaatccgtcaagtgtcaggtatcgaacccatcgagggtgcagaccgtattgagaaggccttcttcggaggctggaccaccatcgtcccgaaaggagtgctgttgcccggcgacctggctgtctacttcgagattgacagcctgctgccagtggcagacccggcgttctcccaccttaccaagaacctggtgaaggttacccggaagaaagaagcctgctccctaggtatggattgtgagatggcaggagtgtgttatgccgtgtcgcaaggctgccccagcgagtgtggaggcgaagaggaggtggtatactcccgactgcggaccatgaaaatgcgaggtgtcacctcacaaggcttggcccttcctctacgagccttcccaggccgcctggcccagttggaagctggcatccttcgccggctccagaaagcgcccgtgcaagaggtgttggacgatctgaacgagaagatgccgctggatgaaatgctcggtgtgctgaagtacgagaaacctgaagaggtggcggcagggaacagtaatgtttcccgtgtcagcacgttccctcgatacatcccgaagacggaccaggaacgggttcagaacatccctctggagaagatcatcgcagatgggccgtaccaggtgaccgtcaagatggatggctccagttgcaccatatgggtgaatgaagagggtgtgggtatggccagccgaaatcaaacactcgtggagcccacctggacgaatttccccagcttcgaggattgcaatcactttggacaggccgtcctggaccaggacatcccgcgcaagttggcagagttctatgaactcagcaaacagccgttcgcaattcaaggcgaggtgtgtggcccggctatccagggcaacaaggagaaactggagaaacccaccttcttcttgttcagcgtcttcaacatcaaggagggtgcctacgagtccccagagtattgcaggatgctggcggaaactctcgatattcagcatgtgcctgtgctctcgacccggcatgtgtttgaagatgtcacttatgccgacatccttgccatggctgaaggtaagagctataatcctgccaccaacagggaaggccttgttttcacagcggtagacaagaaccgctacggtcactacccccatttcaaagttatcagccaatcttggctggcgaaacacgagtaaggagagtccatgcagtcgcagttccaaaacatcctgaaatccctggaaatcgctcgtcagattcgggatgacgaagagttcgcccggctggtcgagctgggcatggttcaggcggacatcatgaatgagtcgttctactgggttgacatgcagggacgtttcaggcagtatactcctcacggcttcgaacactgatcaacatggcccggctagtccgggccttacaggaggaaacatgagcgaaatcaatttttatcccatatctgctgagaatatttaccccggcctgactcaagcggcaaagatcgtcctgctgatggttctgcctgagcttcgaggaatcatctgcccagacacaggtgaacgtctgcgggatggcttgggaatgcatggtatcctggagtgcgtatgggaaagccgccacaaggttcatgccatggaccagtgggccaacttcatgcaagggtacaagtccgaaatgccgggctccagcgacatgtatgaccaaattcaacgagcgttgccttcccggaacacgctgaaacaaatggtcttaccgtacctggaggcttgcaaacgtcaaacccgcgaagagcgtattgcacaggagaagtaccatgagcaaatttgaaactcttgacctggtatgtattcatccggacccggaagtgtccgggagcaaggggactctcttcggagagttccgggaaaaaggcgctataggggtagtgttttatgtcccccacgggataagcgcacagggcaatgtgaagaacttcggggatgagaaagggtacggggtagtatggtatgtggaaggtcgcctccgcgttatgtacggcgtaccagaaactgacctggttccttatgaagggcctcttcaggaggatgacttcccatggcatgcattgcctcttccaggggaggtgatctacttccgagaagaggggtatgttaatggggttgacggtaaggccaagaaagcaaagtatgacaccatttcaactggcgccgtgtatggctactcctcagacatgaaactcctgctggtgtcggtactccctcatggggatgaggaggaagtccccgtagagaacgtagtgggcctgaagctagggatcaccgaccggatgatagaggagggctacctctaatggcaaagctgaagctagatgggaacatcctcaccgtgatggaactaacggcaggtcaggccgtcgagaaggtgaagcaacgcattcggatggatgttgactttacccaggtaactgtggtacagtctggtcctggagtattccaagtctcttaccctttgaacaagggtgagcgtggaagctacaagcacctctatgacaagcaggagaaggagcgtaaggcgaacaacccgcctcccgagccaccacccctcctgctggcgtaaccctcagggccctccgtgggccctttttattgcagaaggagtaggaagtgctgattgggaagttcgcctgtgtcctgccaggatgtgatagcagcgacgctatggcggtctacgaggacgagccgggggtcttcggtggacgctgtttcagttgtgatcggatggtttcgaacaacaccctggcaaggtctcccctgggggaagagttgggagcagtgatcatcaaaggtgatcgacgtgcccaggcccagaggaggaaagaggagaaagaagtgagagagattcaacgcaagcccgtcatcactgccgaagaccgggagaaaatccaaggcaacggcggggctgacacgactctgttccggggcatcgcccggcagaccaacgagaagtacgggtgtatcacgcactacgcagacaatgagcctgtggtgcggtattatccgatccacgaccacggcgagctggtaggatacaaggttcgtcagattcccaagtccttctacgccattggtcggaacgacaaacactgcgagctttatgggcaacacctgttccctgccggaggcaaatacctcctcattgtaggcggagaggaggatgctcatgcagcttaccagatgctccgagttgaccagctccaacgctggaagaagaagaacccttacgcggacatcgcagatgcaccgttgccgtacccggtcgtaagtccgactgtgggggaaacctcggcagctagccagttggctgccaactatgagtacatcaactctttcgacgaaatcatcctcatgttcgacgcggatgagaagggagagcagggtgctcaggcggcgctggaagtgctgcccatggggaaggtacggattgccaacctcccagggaaggaccccaacaagatgttggaggacaagcaggccaaggcgttcatcaatgccttcttcgacgcccgcaaggcatccccggcaggcatcgtggggtcagggcagattcgagaggctatgctgaacaaggcaatggcgcctaagctgcctctgccttcgttcctgtacgagctgtccaggaaaaccgctggaggtttcccgctgaactccatcgtcaacctgatcgccggttctggcatcggtaagaccacctgggtcaacgaattggtgtaccattggattttcaacagtccgtacaagatgggcatcgttaccctggaggctgacatcgcagagtacgggggctacctgctgtcccggcacctgggccagaagctggccttgattgaggaccctcaagagtacctggcaacaatcgaatctgacagggtagagcaggcgagtaacgagctgttcctcaacgccgatgggtctgaccggttcctgctggtagatgatcggggggaccacgatgcaatcaagcagaagattgagcagatgatcatttctgggggcatccaggtgatcgtccttgacccaatgtcggacctgattgacgggatggacacaggtgaacaggcgttgttcatgaagtggcagaagcagatggtgaaggcttacgacgtaatcttcatcaacgtcaaccacacccgtaagggcaaggacaacaagactgctgcaagccggggcgctgagctgagcgaggaagacatcattggctcctcgaccatctacaagtcgggcaacatcaacatcaccctggtgcgcaacaagcacgcggaggacgatttggaacggaacaccaccctggtgacccttaccaaatgccgccacacagggtacaccggaccagcgggtagggtcctgtataacatcaagacacacaccttgatttccctaacggacttcctcaaccagcaggtggaggagtacaaccaggaacatggagagtctgaagggttagagcaataccctgaagcagagtgtgtcgagcaagttcattcgccggaagatgtggctcccgtctaccctcagttggacggcccgccgccgaccggggatgatgatattccgttctgacggatgaaaggaggagtaacgtggaagaggtacagaaacgccgggtagtattcgatatcgaggctaccgggctgatcggggaggggacggtggactacaccgcctcgccctggcgcctgaaagaggatttcaagctacactgtgctgtagcccgggacattgacaccgacgaggtgttcaaatggggccctgacgaggtgatggacttcgccaaatggttgggggaagagtgctcggtcgtaattggccacaacattatcaactacgacttgctggctctgaagctgacatgcggcctggagtacaccatcggatggggagagaccaaggacaccatcaacggtaaccccgtcaagatcgtggacaccctggtaatctccaaagcccttaaccctgaccgtcgccctggccacggcattggggcctggggtgacaagctgggcctggccaagatcgattggcgtgcgaaggctgttgaactgggactgattaccgagaacgcccctcgtggtgcagagttcaagacgtatcacccggagatgttggagtacaacgtccgagacgtggatgtcaacctgctggtctacaaagccctgatggcagagtggggtgcatggaactgggctccggcagtccagaccgaaagctacgtggcttgggtggtgacccgtcaaagtcaccgagggttcttcttcgacgagcgcctggctcaggctaacgtccgggagctggatcaactgatggaggagtgtcgtgccattgttgaaccgatccttcccccgaagaagccgaccaagacggaagctgccaagtattgcttcccgaagacccaggagaagaagatcaagggcggtctgggactctccagcaacatggagaagttcctggagaagatgggcggtaagcaccttccacgttcgggaccggatgctcccaactacgtggaaatcaacggcaggacgtatggcctaccgttcgatcatacggtaagcttgctcactgaggtgcctgccaagatcagcgatacaacccacatcaagggttggctggtggatatgggatgggacccgacttcgtggaaggagcgtgatctttcgtcggatcagaagacaaaggcccagctacctttcgagaagttcgaaaaggtggtgacctcgtacatcgagcaaacctatgcaagcccgttcaagaagtaccgcctggagcacctgaaagagaagctgcgtgctaagtggtccctggccttcatgatggacaacccagatattgttctggagtacatcctggagcgaggcaatgatcgtcagttgaaggtgtggaccaatccggagttcaccgtaggtcaggacaaggacctctgtcccgccctggaacgaatctccgagaagttccctcacgttcggcacgtgaccaactacctgacgtatcgccatcgtcggaactcgatcctgggtggtgggtatgacccggacgacctggacgaagacggcatgcctgttaaggggtacatggcttatcagcgcgaagacggtcggattgcaactccggcagacagttgtggtgctggtaccagccggttcaaacacaagcaggtggccaacattcctcgtgtgacctcgctgtacggggtaccgatgcgaaacctgttcggcgtggacaccaacaagtgttggcagattggctacgactttgactccctggaagcgaagatcgaagcccactactgcctgagcacggcaatgcgtctcagccctgctgcggcacagaagctcaagatcaagtttgggtccaacttcgccaagtaccgggaagcatgcatccaggcagcgcaagagtatgcggtagcgcttgtggctgagaagcccaacgatattcacacggtgacggcggcgaagatttccaccatcatcggaggagacttcagtcgtaccaacgccaagtcggtcaagtatggctgctcctacggggctcaggtggcacgtgtagcgaagatcgtcggctgctctatgcaggaggcccaggccatcttcgacgccttctgggaggctgctagcccccttgcgctgctgaagacggttctcaccgacttctggaaggagaaggggaacaagaagttcatcgttgggatcgatggccgccagattcctacccgttcggagcatgctctggtcaacagcctgttccaatcggcaggtgttatctgcgccaaggtggcgatgatcatgcacgaccagaagctgatggctgaaggtctgctggtagacttctggaaggacgactggaagaacaagtcgtactgccagcagctcattgcttaccacgatgagagccagttggaagtgaccaaggatttggtcaagttcaagatgttctccaaggaagccttgggctggcaagagatgcagcacgaggacccagaggagcagaagaagcttcagaagaaggaagacgctcgatgcaaggccctggtccagaagtggaaggacgagatggaagagtcctcgggtcaaatctggagcgacatcggagagtccccgaagggtggttggttcgtaggctacagtcgggcaggggagacggctatcgaggctgtcaaagctgctggtgaacacttcaagctgcgagtagacctgtccgcagggtacatgttgggaactacgtggggcacctgccactaaggtgcctggaggaaatatgagcaagaaaggtaataccgaaccgacagggatggcgatcctggattacgtgaacatgcgtcaccaggaattggaagacttcctcctgtactgggtagagaaccatgccaaggggaagaactttcctttggagatgcccaacgatgcggagtggtttgagcatgagctggcctacctgacggtggaaggtatccgagaggcttgacattgcctctggattgtgcttcaataggctcctcgctgcaacaatgcgcggggagctagcaacctgaagtatgtgagtttttgataaaagtccttgactttcaatagcttatatgcttcaatagcattccaaatgaggaggacatcatgtctattcaagtagaggagaccaccgaatatgtggtctgcaacaagtacagcctgaccagccggtcctacaccttcagcctccgggaagacgcccggaagatgaaagctcaactgggtggcaagcagttagggtggatcatcgagcgaattactcgcaagattgtcaccgaagaagttcgctaacaagcgacaaaccccccgattaggggcaactaccgcccgatagggtaattgataggagaagtaaaacatggcactgcgtcccaaaagcactggcaacaccggcaccccgcgtgagttcgtcaacctccccgagccgaccccgggtaaccacgaagcccgcgtctcgctgatcgtctacctgggcgagcaaaaccgggaagacttcgttgatgagaacggtgagagcaaagctcagaagcctgtggatcaggtggcagtattcgccgatctggtggaagaagtagtggactacggtggtgacatcggtgagcaacagtaccgcctgatgctgaacaagtccttccgtggtgaagtgagtggtatcaccctccaggcgaccccgccgcgtgacggcgaaggccgtatcgtcgaaggtggcatctggacctaccacccgaacagcccgctgaccaagctggcgaaagcaatgcaaccgggtgcagcaaccgcgatcctggacggtaccgacctggatatcgagccgctgctcaaccagccgttcatgtgcaccgtgaacgtcaagaagaccccggcgaagaacgacaagaaggacaaagacggcaacccgctcgtctataccaacgtcagcttcggtggcgcgacccaggtcccggccaagatgatgcgtgcaggtgtggctgagcttcgtcagaagccgctcctgatcgacttcgacaacgtgactatcgagaccgcccgcctgctccgccgcgatgtgattcgcaagattcagcaggctaacaacctggctggcacccgcatggaagccgttctccgtgaactggccaaggaacgcggagacaaggtaccggaagccaacgaagctcccgcaccgcgccccgtagcaacccagcagagcgctcccccagctcagggtcctgcttcggacgtggacagcttcgacgacgatattccgttctaagacggaaccctcagggcccttcggggccctttcttttactccaaaggaggagatgagaatggaagattacgtggtgatcaagtgccgcgttcacactggtttcgcagggggcatccatgaagatgaagaacacctgccacgagacgagtgggaagagatgtcagagaaagagagggaggggttcctggatcggttcgcccaggacatggtaagcaactacatcgatgcccacgcgtgggtggaggaagagtaaatggcacagaacaacactctcgttgtgaatgaccagcacaacgtcttcgtcctacggctgccgcaggcctattttggccatgacattccggtagccatgaaagaggatttccagtattggaaagagcagctacatcttattgctcaaggctccaaaagcacgctgatgattcccagcacaactgacccggaatctcgtcagccgctgttcgacttccaaatcctgcctcggaaaactgagcaggtttcccccagcaccatcaacatccagaactgaaggagagaatcatggaaaactacaacgacgcacgtgaaggtcagatgaccgagaaggacctgttcgaccgcctggtgaccctgcaccgtgaaaagctgaccaacgccgaagaccgttcgcagctcaagaaggatgccaaggagcacggcctggacaaggaccgcatcaagctgatcgacaaggcagcagcccacgacgcgaagcgcgacttcgaggagaaagactatgagttctcccagcttcgtcaggtttacgaggaactctcggaggacgcataatgtcccaaccggcagatacaattgccgtaatcgacggtgacgagtgggcctttaaggcctgctctgccgcagaggggcgtgctatcatagcgaagcacatccccagcggtagggagaaggagttcaaccatcgcacggaattccgagacttcctgaagacccagcacggtgggaagttcactgaggatcagttcgaaattcgggatgtccagtacccggaacccatcgagaacgtcctgttcaccctcaagcagatgattgccggggtgtgtgctgaggtgaatgccacgggctaccaggttctgatttcgggcccggacaacttccgactcgacatcgaccttcccaagcgctaccgcacccctcccaacaagcgagcgccgaacggcactgagaaggcgggacgctacaaagagtcccggggggattccctccgtccggtacacttgagcgacgccaagaagtacctgatcaaaaagcacggggcactgaccacttatcgctgtgaggccgacgatgctctggcaacccgagggtacgccgggcgtattgccgagctgaagggtgctgctcagtggatcatcccctgcacacaggacaaggatgcgatgggtgtggagagtcgtctctacaaccccaacaagcctggcctgggcatcatggataacagggggtttggccagctcgtcgagatgggtaaggatgtcaaggggcatggtcggatgtggctgtacttccagattctcctgggcgacagtacggacaactacaaccctcgtgacattctggagtgggccacctaccaggcaggaggaactcctaaacccttcggagagaagaaggtctactctgtcctgaaggactgccaggacgaccgggatgcctggaaggcaatgtacgatcaatacaagctctggtatccggaggaagtggagtacgtgagctggaccgacgaggttatgcgaaaggacgccattgacatcatgcagatgtacgtggactgcgcccacatgcagcgttgggaaaacgaccgaatcaatgtccggcagacgctggagaaaatgggagtgatagaatgcagcaagtaagccttacagattggctggaagagttggacctggttctcgaaagtcgcggcctgccgtcagcccatgcgtacttcctggaaggcctgtacggggactactacgaccaaggcctgactcccgaggaggcagtcgaagaggagttcggctgatggagacggtcaccgagaaaggcaagttgtgggggtggttccctcacatgtacttcgttcgggcgggtatcatctgcgtgatccaattaggacccctgaagctgtccaaggtgggggctatctacggtatgggcctgttcaaccggctgttgttccagtggggtgggagatgagtgttcgtcgccgcccctgggaagagcttccagaggtttggaagactgaggcttcattcctgtcctggctgcgaggaggtatccgtcgcgccctgtggatgaggcacccggtcaagctagagttcatcaagaacaactctgtggagatggtgaacaccaacccacgaagcatgaagcggttcccaaccgtaaaaggcgcccagtgctccaaatgtggggaggtgaagcgtgcagcggacatggaagtcgatcaccggacaggggagttcagccttcgatctattgaggacctacaaaggttcatcgaaggcgtggtgctggtaggtatggacgacctggcatggctttgtaagccgtgccatgaaatcaagactcacatggagcggcaaggtttccatacctggggagaagcccaagctgacaaggaagccatcgccattggcaagaaaggcgtgagtgttgtcaaggcatggctgaaagagcgaggggtagagcctggcaccacaacagctaagcgtcgggatcaaatcttcgctatcctgaaggaggagtacaagtgacccaacgatgcatgttccggcaggatgattcctgccactggtacctggtcccggaagcagagtgcaggcggttcgatgagctgtgtgccctgatcaccggagaattagagccggactcggaagagtggtttgacgccatctgcgagttcgacaacagctatggccacctacgttgtggtcacccgtccaattacgtcatcacggcgcactaaggagatttcatgaaaccgtggcacaataccgctctagaactggcagcagccgggaagtcctggcgtcagattgccgtggagctgggcatggccaagtccactgtgagcgacttcctacgaactcagaagatcaacgagaacaagccgatgcccaaagtgctgatcctcgacatcgagacggctccggctatcggctattactggagccgctggaagactacggtgggccagaaccaggtgttgcaagagggttatttgctcaccttctcggccaagtggctgggcagcgatgatatcctggagtgcaagcttccggatttcgacctctacaacaccgagccgaagaatgaccgagagcttctcaaggtcctggcaggcctactggacgaggcagatttcgtggtggcgcacaatggccgcaagttcgacctgccgacgatcaatgctcacctggtgaagcacgacatcttgcctcccagcccgtacaagatcatcgacacgtgcgacattgccaagaaggtgttcaagttcccgagtaactctctgaagtccctggcgattttcctgaagtgtcagcacgataagcttgatactggtggtttcgagctatgggcgagagtcatggatggagaccccaaggcttgggaccacatgatggagtacaacgtcttcgacgtgattgtcctggaggaggtttacttgaagctgcgtgcgtggtataatacccacccgtcgctctctgcgttgatccctcagaaggtcactcctcattgccctgtgtgctgctcggacgacttgcgtccaacgggtaaactgtactacaccgcagtgtcggccttcgaggttctccgctgccatagttgtgggaagcactcccgcactcgtcagaatgtcttggaccgggaacacctggtagtcggcatctgattcaaagcccaccttcgggtgggctctttcatatctacaaggagaattcacgcatgatcatgagcgatctgctcgacgccccagagaagcccgaaaccaccgagatggaagtgtccatcgatcaggagttgggggctgacctgctgatgtggttggaaaagaactaccccgacaccccgatgatcactgtgtatgtcactctgctggctgccacgcagatgattgccgaaactatgaaggtggcctccacctccctggacgaaggagtcaagctgtgaaactgggaccctctgtagtgatcgctgccaacgagtatgtagcttccaaagaagtggcagagatgttcaaaaccattggaagcgatgctggatgggtaaaccctgtagcctcttccgaagatgagggggaacacacaggaggttcttccagctactaccaggtagaggtcagaaaccccacctctggcggggagccctacataggggagtgcaacgattttatcgaagcactggacatgaccttcgccgaagcgaacgtgttcaaggcaatctggcgaaaagcagccgagcgcaccttgggtaagaaaaagaagggcaacaacgctgtctatgacgccgagaagatggtattcttctctcaacgggagctgattcagacccgtgctaaagcagaaacgaagaaggagtaaccaatgaaagcgagcgtgatcgccaaaagcatttcctacccaggtacatcacagttcccggtaacaatcaccaccttcgagctggagtatccccggttcatccacgccgagctgatgacgcaccacgctctcttcaagaactgtgcctccagccgggctatcccaaccaagaagctcattgagcaggtgcggaataacccagctatgccagtccattggggtgctaaccaggccggcatgcaagctcacaaggagctgtcgaagcctcttcaggtggcagccaagtatctctggatcaaagctgccaaggccgccgctgggatggccctggccatgcacaaggttggactgcacaagcagattgtcaaccgggtgcttgagcctttccagatgatgaagacggtagtgaccgctaccgagtgggagaacttctactggctccgtgatcacgaagacgcccagccggagttccagcacctggctcgaatgatgaaggaggccactgccggggtggcccctgaattactggtccctggtcaatggcacgttccctatgtgaaaacagagttcatcccgggcatgggccggcaatacttcgatgagaacggggagatcatctctgtagagcaagcgttgaagctttctgcaagctgctgtgctcagaccagctaccgggccactgacaagagccaggacaaggccgaagtgatcttcgacaagctgatcaatagcgagccagttcacgccagtcctaccgagcaccaggccacccccatgcatatagcaggtggctgggagaagggtgtgacccaccaggatcgtgatggttgttactggtcctccggcctgagaggttggattcagcatcgtcaactaattccgaacaattgcaagaaggggtaaactgtgagtcaaggtaaggtcgagttttcgctgtccgtgtcggacctgcggctggtaactggtttcaaagaggcgttcgctgcctaccaggcaggtaaccccaaggtcttggcagccctgctgtaccgcaacggcatggacaccacacagccctacgaagtggttcaccgggaacaccggaacctccgtgggcaacatatctccggcgaacgtttcgaaggctatgagcgactggacgagagctggatcaagaagggggcaccgagcgaggaggcaatcatcgcctctgccaaggacggtagcctccgtgacgagctgatccacatgggtcggcgactaaaccctgcacaggctatggtggatttcctgaatgagtgagagtgttcagccgtataacggcattctgattgattattccctggaccggacgatcccggaacaaggattggcgatgctcacctcggacggcttctacaagaaggaacacgagacatcgcctcaacaaacgctgtcacgagcagcggtgagctattgcttcggtgactacgattttgctcagcggatgtatggttatttcagccggcagtgggcagtgcctgcaagcccggtacaaaccaacgccctggacatcgagtggcccaatttcaccgaagagcagtttgacgaagcaggggactggcttcaagaaaacatcgataccaccgggatgcccatcagttgcttcctatcgatgatcgcggacagccgtaaaggcctcacaacggcctctggtgaagcgaaagagttgagcatggctggtggtggggtaggcgtctacgcaggcatcagggccccggatgagctgtctacgggcgtcattgagcacgctggcgactacgatgtcatgtgccgggcttaccgtcagacccgtactcgtcgtggcagcatggccatgtacttggacgtggctcaccctgagttccctgtgttcctccaaatgcggaacccggtaggcggtgacccgaagctgaagcgcttcaacctgaacaacggtgctaacatcccggacgccttcatggaggcggtcatcaagggtgaggattgggagttcgttgatcccaaacacggtaagactggacgtaaggttccggcacgtgagctatgggaagagatgcttcaggttcgtaaggacacgggcgagccgttcatgttgttcgtggacacggtgaaccgtaacctaccggaatgcatcactcatccgctgtaccgggtacgacagagcaacctgtgctccgaaatcaccctgtacaccagcttcaagcgtactgcggtgtgctgcctgtcgagtgttaacctgggcacctacgatgagtggaaggacgaccccctgtttatcgcagacatggttcggttcctggacaacgtactggagttcttcatccgcctggcacctccgagcatgcaccgggccgtacactccgcctccaaggagcgtgcaatcggcttgggaaccatgggcttccatactctgctacaacagcgtatgatcccgttcgaatctggtggcatgggtggcatgcagcagctcaactaccaggtttacaagcaaatcaaggagcaggccgtacaggccagcttggagctgggacgctcccgtggggaggctccggactgccagggaagcgggcgtcggaatagccatttgctggcgattgctccgaatgccaacagctccagcctggtcaacgtatctccgtccactgaaccctgggcaggcaactgcttcaacgctcaaggccgggcggggagcttcctgatcaaaaacgaatacctccggcgagagctggaaaaagtcggcctggacaccaaggaaacctggcgttcgatcaacgatgctgagggctcttgccagcacatcgaaggtttgagcgacgaggtgaaagcggtgttcaagacgatccgggagattagcccaatgtggttgattgaggcagcagcagggcgtcaacccttcatctgccagtctcagtcggtcaacttgtacgttcacccggacatcacgctgcaagagatgtcggacatccacatctatgcgtggcacaaggggctgaagagcctctactactgccgctccaaggcggcgaagagcatgaaggttggtaccgggggcgctgagcctctgaatgccctcccagtgcgatacacaatctccctggacgaggacacttgcctgtcctgccaagggtaaggagcacacatggcgttaaccgtggaaaactgtctggcgttgcagtacaagtacgtcaacttcagttatccgatcacgatgaacgaagacatgatgttcgtggtgccaattccaccatacaacacctacttcctcatcgacgcaatggaccattcctccactcacggaggttcccaactcaagctgctgattgcgggctggttcctgttcccgcctaccgctagctatgagtggaacatcatgggcgttgccgaggctgaaaagaacgagctgttcatccctcacgaggtggaagaggcagacatcatcctcaacccgatgcaacccccgccagaaggccagatgtggccgcatgaaatctggactgggcagtaaaacaaaggggccttcgggccccttctttgaaaggagagattgtgagcgtatttgttgaaagcaccagttaccgtccctttgtttacccttgggcagtcgaggcagctcgggtccatgccattgatatgcattgggatgttcaccaggcagacctgacagacgacaagcagcagtatttcagcacctcagggctgggcaccaaccaggttccccacgagaaccacaagtggctgctggacaaaaccctgtccatgttcaccgagatggaccggacagtcggcgagggctacaccaagctcctcccgtacatcaagaacaatgagattcgaaactggctcattactgccgcctcccgtgaggtggttcaccagcgagcttatgccctggcagccgaggagttcgggttcaccgatggcgattggaaagcttttgcctcctacaaggagatgcgagacaaactggaggtgatgggagagaatcggatagacgcaagctggtccgagcccctccaggccgcttgcatcctggcccaacttctgaccggcgaaggtgtaggcctgttcggtgcgttcactgtgctgctgaacatgaagcgttgcggaaagctgatcgggttcaacgacatcaaccagtggagcctggcggatgagaccgaccacgtggagaagaatatccgcgtcctgaaagccatgcgtaaggaccttaccccggaagagaatgcgatcctggaccaggaaatcagatacctgatcgaagactatcgggaagccgaggtcaagtatctggtcctggctttcgagaagggccctcagcatgacctgaccttcgagcagactgtcgagtacatcgactacctgtgccgcctgaggctcttcgaatgcgagcttctcaaggagcaccaggtgggtgagaacccgttgccctggatggaatggatgatcaacgccgcccgacacgacaacttcttcgagaagaaggtgacggactatagccactccaagctgagcggtgatgtggattactccaagtacaatttcatgttgactagccgagctggttgacctatcatagcccccgtgagctgaagagccgtgggggctttttcgtacctggaggattttatggcatctcttttcattcttcgaatcgaaaccgtgtgtggcaagggtatgtatgccgacgcactgagcagcaaggtgcaatccaagaccctggagggcctgggataccctcggtggcaggctactggcctctatatcgatctttgcatgtgcttagacaaggagaaggaacttcatccagtccccgaggaagacatccccgggtgggaagaccttgccaagaatgaaaaagagatgctcacttactatttcggcttcagttcctgggagcaagcacgagagtgggtaggcttgcgtgctttcaacgagatgggtatgctaggggccaacctttgcatttacgaaatgaaagaggaagatgtcctgctgggagggaaacaggccgccttcaaaatgggcaacgctctccgggtattgaagatgcccattaacaaggacatgcaagatttgatatgggaggagattgaagggtatgacgactaagctgctacgtttccaggcagagagccctaaaggggagaagatcacattttccttgaactggtggacagacgggagtacaatctggtatcgtatccaggcggatcggggagcttcccgggcttacaccgacatcccttgccagcaggaggccatgaaggacctcatggaggctcgggaggtgtggatcagggaagggttcctagacaagttcacctcatttacaacgaaaggaggagttggattccatgagtaaagaaatcgaagcgtttgacgtggcaggccgccgactgcatgtgggcgaccaggtggctatcgccagcaccgcagggaaggctactgagatggtagtcaccactgtggaagctgtccgggcgaagacggtaatcctgaaacatccgactgcctggggtgctcaaacctctcggcgtcactcggctgtgtgcaagattcccgaaatgaatggaaaggaggtgtaaagtgaacaagactattcgagcccagctcaacaaccactacgaccggcaggggctgacgggcaatcatcgccgtctggcaatgaaggctgacctccggctggtcagggagcggactgaccatgacatggcggagtggttgcagacggaagaaggtatgttcgtgggtttgaagagcgcctttgtgtggagtaacaccccggaaggctatgacttttggctggataagtacggccaaagctgttgacagggtgcatggggccgggtaaactggccctatttcaaccgggaggtaaagatgaacgatcaaaactacgatttccatgcagaggggaaattccccgcccattgcgacgaacgggctgaacgcttcttctccctggttttcgtagggaagagtgtcaagggtgcggataagtacggctacacctacagttggaactcccgccacgccgaccttcaacctacttccacccttcaacagcgagggtcccactcctgctccttctgtggtcgtgctgctcttcctatccagaacagcggggatcggtttgccgggtacgactactccgtcgaggggtacacctgcatctgctccggcgccatggacgagcttgactggattgttcaggcccagaggatgaagaaacgtcaccaggaggaagtggaagagatgttgcttcaacgtccggtacctccaaaagatgtccgccaggagctgacaaaaaatcgtctgatgaggttgctttctgacgtggagaatagtaaccttgtctccgcaatgaggctcctggagataacctccaaccgcccctcagtatggaacgaaagctatgaacacttgggcagctaaacgccaggaagagatggtagcctgcgggtactctttcaaaaagcacgaagacgggtattgggagtgccgggacgaagagggcaccctcatcgagactcaccgccaactgggcaaactgatttcactgatggccagctccctgggcatcgattaggaggatttcatgcaagacctgtatagccaacaccgcgccgctgtcaagaacctcatccgggaggggcgtaagctcaaggcgacctacgtcatgaccctctacatggagggttccagcccgaaggatgaagaccctgtggtagcccacctcacgttgggtaaaacctatgctgttatcacagacggcctttacaaggatggttccttctacgtggtggacgatgagggctgggatcacctgtttaccctggatatcctgcccgaagaagatggatgcctacggttcgatgtgttcgatcacttcgtgttcgacgtggagggtcccctttaatgtacgagattcaattgatcaacgactgcaacggttgcacggctactttgcaagtcgcagatgaagagtccgctctggatttaatggaggagatggagtatgcctggacccggtatggcagtgattggatgccgtcttggttagggtttaatccgaaactctcttgacaacaccggagggctcttatacactgagcactcaaccacctttggaggatttatgaacactgctcaaaccatcgcagacatcctgattcacctcgctgaccgtctgtacactcagaagggtcgatgcctcatcgacgggcgctgcaactatgtagatggccagggaaatcactgtgctgttgggcacctcctaagctcccagtcgtgggagttcgcttccaagtaccacggcggcgtgccatccctggagaacgactgggcgcggcgtaaagatggaagtgtggagactctctatgacgagaagttcttcatcgcagacatcggtgttcgccgccgtctgttggactctttgcagttctaccatgatgagccgtctatgtactggacagtggctaaaagcccgtcattctcaaaggtaagcctcctgttgtctatggtggatttcctgaacactcaaggcctggactttgttgagcgcccccaatctagtgttaagggcttctggtcggaagctaaaggaattcttcgcaatcgggggtaccacgtatgaacaaggctctccttctgaaagaccagttggcagcagccctacgatgtgaagaccattccctgcaaggtgttgtcagttctatcgtgttcggccctacccaggggcttgatcataacggtattgcgatccgtgggccgggacttctaagtgatcaccgggaactggtacagcgagccgacagggtgtggatgaacatcgcctaccgtcgagcaggtttgctagtcaacatgaatggctttacccggtctgtggtagatgtgtttattctcaaagacaggtatcacgggctgacagggttgaggtccgtgggtgtgggtgagggatgggcaaatgccctggccatcgactgtgccctgctgaagaagcagttcgaagttattgtcgaaatcccttaccagtacgaggggtgggcaaccgacctggtacgggcgggtgagattcctgaaggtgtgaccatcatgtcctcgggggtgtagatatttgaggggctggggatatttgctctagatatttgggtggccccctatttcgagctagatatttgaaggggcctcccagcctcgctatcacattttaagccggcccctgactcacggcctaggttaggggagaaatcgtctcctaggcccatcagaggagcttccaagtgcatatcactatcatgcgtacatctggtcctgagattcgttgtaagaagtgcgactcttccactcctgcacgagacatcgtagagggcctctgcccgccctgccgaacactcaaggcctgggagactctcggtcaagctgcccaggaactgtgggcttccactttcaagagcgtcaagatcgattccgttcgtcttgatcaaggtacctgacagattttcacagccgggcgcaaggtactcgacagattttcaccgagcgctcaaggtactcgacagatttttacagagacaggtatcaaaagaactgccaagattcctcccccaggtggcccgacccctcggcctcttgtagcacgtcaactccccgctgtagcacgtcactcccccggtaagtagctccctatctatccctctcccgccgaaactgcctttcacatgcaatcaccatgccaaccttgaaaagcgggcaggggcggtgtttgtctccggcgcccggcccctccggcctgctttcccgcatgcctacagaatgccaggatgagcctggagtgtcaagccttgggccaggatttttcatcgccgacctggcatgttccttgctacgcgtgcgcgttcctcacctggcgttgccggagcaatttcttaaaaaggggttgacttctaaccgtgccaccgtagaatgaccctcaagcaaggcaaacaacctgtaggaaggtaaccatgcaaaaagctctctgcaatcaacgtgacctgtacgctgcctataaccgtggcgagtatgaccgcgtggccgtagacctgaatcggtacttccccattgagcgggataatcagtgggaagatggagatgcgaaccttcgtcgtcgcacctatctggtgaagcactcgaagggcgtggccaggtggcacactctctatcgtaatggtcaggttcacggcgtcggcgttatcttcgacgtcaagccggacgaacccttccgaactgcctgaggagagacaagatgtctgtcaaaataggggatatcgtagccatccggggcgaccttcggaaaaagctcgacggaacgtgccaatacacgtccgaacagttggtaggtggtaagttcctcaagcataccggcacgggagaaatatggactggccgagtgagtaagatacaaggtgatatggccaaggtgggaggggcttggcgtgggatcgaattctatgtgccggttgacgaaataaacgcttgacaacctgattcactggcagcacaatagcacccccaaaccccgacagaggtaacacacgatgcaaattcatttctcctcccgtaccgcagcccgtgctttcgtgaagggctcttccttgcctcgccaggtaaccgataacggcgcggaagcttcccgccgctggggagtcaagctgaatatctcccccagcgtccgagtgctgggctgcgaatacctcgcctttggcaaggctggcaatacggtgcctgtctacgtcaagtaacagcagagtgcttttagggttgcccctggacgccgggggcagcttgcctaaatccactccgtaggagataacacgatgaacactgttcaaaaaaccgtcctggcttttgttctgaccactcccctgtccctggctgctggcgccatgatcggcaaggccgttgccctccctcccgcactgaaagctcaggcggttagcctggagatggcgcatgccaaggacctggcagacaactacgttcccaaaatgaacatcatccataccgctacaggtgctatcgagctgggccaggtgtacggggaccgcttggcgggcgaagtcaaaatggtcgttaagggcaaagtgatggccagtacgcacattaacggtcgcagtgttcagcaagccctggaggaggcagcaggtggcactatcgaagatcgcgtgttgaataaggatgtcactttccgaatcaccatggatcgcctgtaccagtccgaaaacttcccgcagttcacagtagtgatgctgaactcctctgtctatggcaaagacggtgacagcctaaccgcactggctgcccgcctggaaaaacagcgcctggccacggtgaagctgttcgaagaaacccgaatcctgaaataaagtgttgacacggcatctcgtgtctgtagaataggcatcacagagggggacggtccccctcctcctaaaaggatatcagcatgaccactctcgaccctaaagaactggcacgtcaaggcatgatcaaggaagctgttcaagctttcaaagatatgggcgtagattctccctggaatgccgagaatgtggcaacattccgaaactacgatgtcaccctgggcgaggtggacttgtccgaagaggagttcgtggaagagttggattccatccacgaaggggttaagatagccaacatctctttctctgccggccaagtgctgctaaaaatggaccccatagctttccgttgcgcatgcggggagtatgagtctcaattgaccgaggagttggaagaggcgctgcgagacgaagacgacgattgtatcgaattcttcatcgaccccgccgattgggaagcggttgaagaagaggaagaataagggttgacaaggggccaggaaactcataaactggccccaacaccaacgcactgagggtaacacaacatggtcaagttcgaagagattgcacaacgtttcaagaattcccaacgccgctgggacaagccgggcgtcatggctgccatgcaagaggctgtcaataacgctcccgtcaaggtagtggtagagtccaccagcaaggcgctcaagcccgacacccctaccgttcggatcatcgtccgggagtggatcaaagctcggctcggcgaggagttcacggtgtacgatatcatcccctacgtccaccacctggccacccccagcgatgtgaacaacgccctcaagcactggaaactgcaaggcgtgcaaatcccgaccattcgccagcagcagagggaagcggggaaagctggtcgcccgatcaatgtgtatcgttgcgatgagttcgcagcctaacctttcactctgaggagatatatcatgcgtactgacaaatccggcgcccgttccgaacgtaaagaagccatcaaggcgagccgtgagcttcgcaacctgcgaaagaacaagcgtaaccagtgggtcagcaaggactaacctggcgcctggggcgccttccctaaaccctggagaatgtccagggtttacgaaagatgctctagatgttaccctgcaaccccacatttgaggtttaatcatggtcattgaatgtcatcctggacccgtagagtattgcttttccctggcgctgtgcctggctaaggcgggggttaaagtgaaactgttccgaaccggtaaagagtggggagtgattccgtgccgaggcgtttaagagccattccgacctgggtatctgggggagatgaagaagacaccccgcgcaagcctgtcctttcggtgatagaccgggcttgccctatccagcggaagttaaatgccctggaccgagattgcgaggagttacggcgcaagcaagacaccctagagcctgccacttttgaccaactggccaatagcctggaagagcgccggcaagccttgtggaaggccttcgaatccaagtatggcgcagagcctgaggaggacagccacgacactatcaaggctttggccgatgccagtatccagcctgcgcaacatgtggacatcggggcactgctgttgctaggactggtggcgttactcttcgccgcgtggctgttcaaataaaagatcaaaaagggcttgacgtgcgcaacggatggccctagtatctctctcagaaacacaaccccttacttacaaggtagatcgaaacatgaacaccaatgcaaaccccgcgcaaacccttactcccgccgacgctttggaagcggtagaacttctgatgatcctgggaatcgaggcgtaccagtccggtgcatggttgaatgaaagtgattcaactgttcaggttactgacagcgctattgcgttgtggaacgacacgattaaccgctacaagctgctggacctggcacggacgtttgctgaagaagccagcttgttagaacttcaaatcaaagcccgtgaggtttgctaatgatcagtctcgttctcactctctgcactgccctggcatgtgatgattatgtgatcgcgcaagacagcgatgctgacatcatcaatcacgccctgtacgttgaatctgaagagttaggcgatgcctgggtggcccctaacgccaacgaccgcattggccgctacctggcacggttcaacatctccactcccccggctatggtagtggactacgactacactgtggagggcaactgaaatgcattggaacattctcgacgatgtacgcgccagcctggcaatggttttcctgttcgaagcggtccatgatgtggctgcctggaccctgctaggccataagcatggctttgccattgaagacgtggctgccctgtccgccgaattctacctacctctgacggaagtattccaagccctggaggaagcatcaggcaacgtcgaagatgtgagggaaaccctgcaacaggccgccgcaagtcgattagtcgatgactccctggactactacagtcgataacccaagccccgctcatgcggggcttttgtttgcctgaaataaagtgttgacactataggcccttcctgcagaatggccgccatacacaaggaaaatgttccacaacatcatctggagataatcatgcgttcgatcaaatccctcgcacgagaagcctacaaaaaccgctatgcgtttgcacgtgtaaccgttgcccgtgatggaaatatgctcgggcattgggctgaggagggttttgacccggtgaagctggggaacatccacgattgttccaccacggtgaatccgagaaagactggcgtttgcttccgaaaccgtgactttctggtattcactttcgggatggaggtccttaaataaccgctcgcaaatctcctttaccagcccggctgtgccgggcttcacagtaaaaacacaggcagagccgaatccccggggcttgacaccagcgatagccccggtagaatagccatcaagcaagacaaactcacctggagaaagcaaaatgactggtagcaaccctaacatcgacccgaacactgtggccctgttcactgagatacgtttctacatggcgcgcgccttctttgcccatgcattcgcagatcaagctgaagacgccggacagcccttgcaaggtgagattctcgaccaattgccgcaaggttggagcgcggattgggcacccttccatgcggcggacactcttattgcacaactggtcacaggcgtgaaggctgggtaccgttctgaaaaagttcagaaagccacccctgtagagatcatcggtgccctgttcaaggcttgcaagagtcgtcatggtgggcgcgcttatgaccgtgaagcgaccgccgagaacttcgggcattacctggcaatgggcgccatgggaacgggggtaggtatggagtgcttcggcccggacgtggcaaagtatttcgaagggctgccctatgtagagttcggctcgcacagcctgagcaaagattatttctgaggagaacactgtggcaactcacaaggcaattcgtgacatcctgtctgctgcaaccgccctggcatttgccgaggttgaacgcctggcgcgggaagtgttccgggaagaccccaactgtatgaatttctgcatgtctatgggtagtgcatccttctatcgggagtggatcgattgtaacgatccggacggggattggcccatgaacgagtacctgagcgccgaggaagtttatgaaatgtcaggcagccaggccgccaaacacctcgacagcctcctgacagagttcggggaggcgcttcgtctaactggccaccctctgaagttgacccggatgactgaagacagtatccttcgacaaacggactggtaaccacctacatcgggagtctccctcaatgaagcaagtgtcccccaaattcatcattcacgattcgcacctctaccgtgctgccatcctgcccaaggtggaaaaggactctttgggcaactggtacactgcccgatatgtctggactaaggcagggattcctcttgccaggttgatcgcgggagaagatcaaaaccccctggaaagcttcctgctggcagagggcgctgttatggaccttggccaggccgaggagacaactgtggagcctgctactccctggattgtctttgtaggtgatgatccggtagcagcctgcactaccaacgccagggcgcatctccacatcgcggaacaagcgctaaacggaaactctaccgccaaggtgatgcattgggatgaagtcaatccggatgtgctggcgcctatcctgcgtaaactggttaagcacggcatctacctggcgacggacggtcagaacatcgtgaccgtataaagttgacaagacccttttgggtttgtaagatgcgtgccaaagggaaggcataaagccttcccgcttcaggaaggtgaacaggaatgaacatcattgaccggacccaaggccacgagagtcccaatcactgctatatcgtcactggcagcattgggccagagttcgaaccccttcttttcacgtctaagagtcttgctgttcaatacgccaagcaaatcatcaagcacggaaaagcgcacgacgttttcccaccctttacgcctgttatcgagacccgccacaaggctgatatgcaccggttcaccgtccacgacaaaatccctgaataaaagcttgacttccctcccgcttcccgtagactaggcttcaaagggcaagggggccctctttcataaaggtgacacaaatgaaaaatatcgaactgaacatcggtggcaaagacttcactttcaaggtggaggtggtgagagatgatgtgcatggggccccttgggaagagcaagatgggcatggccctgtgagcgattggacctgtcgagataagcgcccgggcgagttagtcttgaacagtaacggaaccaggaagcgtttctatgacttctccgaggcctgccggattgcccttcgtgagggttgggattcttatcctcacaacctctttggcgagcaatccaaacgccagcaagctgcaaaggccgcccgtgccgatttcgaaaatcttcgtgcatggtgccaggatgaatggtattgggtcggggttattgtcaccctgctggacgaggaggggaataaaacggacatcagcgactctttgtggggaatagccagtaacgacgaagactgcatagcctacaaggctggaatcatcgccgatgacctggcaagcggttatggcgtccgctgggacgagacagcaaaaactaagtacgaattcttctaaaatcgcttgacagcttaggccattcgcgtagaatggccctcaagcaagacaaaccaccaacaggcaaaaccccaggaactaaatcatgactactgaaaaccttacctctcaagagatcgaaacttctgttgacgaattcctgaagtcaatcgacgttaccctggccaccgtgcctctcggcgagcgcaaggttgaagactgggtgcatgacctgtggagtgtaagcttcatccgtggcgatggccgccgtggcgttctcgacactgaattccgtactggcatcgggcaccgcaaatccgaatggccgatgccgctggacatcgcccgactggcgccccacattctcgcccgcgtggaatgggaaaaacgccacctaaagcctgtagctcccaaggccgcctgtatcctgtccagcctcatccttgactgcgatgtcggtagttccaccttcgaagagttctgcggcgacttcggttatgacacagatagccggaaggccttggacacttacatggcgtgtcaagagactacatccaagcttcgccggctcttctctcaggaagaggtcgaaaccatccgaagtctggtagagcattactgaacacaagcccccattacgggggctttctttttcctacagggcttgacctggccccctcttcctgtagaatgctcatcaaagggaagcacaacgctccccagacaggagaccatacccatgagccaggtcaagattcaagagtacattatcgcagaggtcaaggttaaccattgtgcccacctgcgcaagggccagaccatccaagcccgcgatgctcgtagcagtgaaaagtggattgcattcatggtggagcgtgggtatagtgcctctgaagccgctatcctgttcaaagatgcacatgatgtggcaatgctcgaactggccgcctaacactcgaccttaataggagttaccaatgtctaatgtgaccgtttggaccgaagaatttgaaaaagcggcagcggctgagggctggcttatcgctagtacgttctctgaatcaagcccctacgaagtgcaggcgatagataacccggaagcctacagcatggataagggggtcccctgccctcctcgtttgtcgggtgaccgtgccgcatgggcgttgttcctctctggcaaagaaccccatcacagtgcggcccgcagcttcatatcccagcactcccctgtagaatggaggttgatactggaaagcgtctgcaaagactgtcaaggactgggccggggaggccctaacaccacggacggaggggagcacgacgattgctgttcctgctctggcacaggtagctccattctctgaaaaacatcttgacggggggtcccaggcttcggcataatgacccccgtcaagcaaacaaaccccggagattcccatgaacaccttcgcatacgcccactacgtcgcccgcatggacaaggcctctggttcgagcctgccctactccaccctgttccgcatcgcccttcgtaacgcctaccgcaagcctggcgtccgccaatacgattacactgccctcgccgaggatgtcaaaggccgcgaactggcccaaaagcgcacccgtgctgaaaaggcagtagtgatggctgccgtaatgcggggaattcgcatgggcttcaccgtgagcgtgaaggacggcagcgatggcgaatgggtggttcgtcagtctaccgatgtcaaggaaatttccgacagcctgcaatccacctgtgacgatgttatccggttccgcaaaggacgtggccctgagaacgttgtcggctccctgtgggcaatctacggcaacagcgctggcgaagtgattgcagactggtcggacaatgacaccatggctatggtgatggctcccgcagagcgcaagatggaaaaatacgctgagatggggatttaatgctttacggggcccggcaagggccccataatgcacccatgccaaacaacagccctggagggcaagacgatggacatcaaagcgcgcaaagcaaaggccgcacagatgatcagtgctgctggatggtctgttgaacgcatcgacttccgccgcaacgtcatccgcatcggcaacgccggtaaaaccgccttcgtaacactgtggcgcggcatgactgacgaaatgctggcatcacaaatcgacttgaccattcgcacctcctaacccccgtcccggcgaaccgggacatcgctttgaaggataaaacaatgtctgagcaagagaaagatgaactggccatggtagtccatcagcgggatatgctcttttcggcattagattccctgatgcgcgatacagggcttgtaaccctcatgcgccctgatcaggttgtaaggaacctctgcgcccttgcagaatacaagtgtccatcccagggacgccagataggaggcgaaaaatgaagagcaagtatgcaaagaacgtcgccaaggaatacaaccttttctgccggcttcgcgggatcacttttgaaagcgccaggcgccacccggacagtcgcattgtgaagctcgcatcatcctacgcctgtgctgcctatggccgtccttacaaggactgtattggtgcctacaaggccgccaagcggcgggagaaggcaatgcgaaaccccgccacatggaagctcagccgggaagctaagcgggccgtgcagtggctacaagctgccaggaacaaacgcaaataaggctgttgacagcctaggccattcctgtagaatggccatcaagcaaggggataagccccaagcactagacaggaagacgacaatggtcactatcactctgaatcacaaaaacatcctcgacaatgcttgggcattctatgcagccgaggttatggtccgtatcgacgccatgcaggccgaggaagagcgccagatgcgtgagtgcatgggtaaccgcgacaactatgacatctcggaaattcagaaggttgtggcctacaacgaaagccagggttggacccgtcgtgccaaaatcgcccgcgcaatcctggccgagcgcctggcagaacccctgattcactcggtagacatcgcctttgcagtggaggccgatatggaagagattcgccgagtagaggtccacaattccaaggctccgaccatgcggcagttgatcgaactgcgtgacaagtggatagccgaaggccgagtcgatttgcatgcgcagactgtggagcttatcgatgggtgggctgatgcgatgttgacagaaaaagcttgactcctcttctccctgggggcattatgtctccaacgaaacggaacagcccccaagggagaaaaccgatgaacctgcaagccattgtcaacgccctgttcgaagccggtgaagagttcaaagcctgcaagcgtaacgccagcggctcgatcaacgggaacagcaagcaagctgtgaaaaagcgccttgtggccaaactgatggaagctggcgagaatcgtagcgacgcttgggccatggcccacgatctgggacgtaactacaactgatcccataggcccaccttgaggaggtaggaggtgggccatcttttaggctaaccctagagagggagaggcaatgaagaacgttcaaatctgttgttcgaagtgtggagcaatcaacggcggtaagagcaaacacaatgttgtagtagctctaggtaagaagtggtgcggacactgtgggtctaatctcgcaacccttcgtcgctaacccagcccagccccggttccccggggcatcaccgaggaaagatcatgtacgccaccctagcacgtctccagaatgaacgatgtgccactcttcgcctgatgctgctcccggagcatcgtgggtacaagttcactggccacccttgggccgagcgaatccgcaatctccacgatgaagcccggtgcatccgcagccatcacaactaacccccttcccagcccggctgtgccgggctttctctcataggaggaaacatgaaagttcagattggccagcataccctggaaattacagccccgatccgtaacaaccggctagctacagagtattgcagtgtgtccttgaacggtagacggctctacgggggtttcaacccttttgaagcctggggactgttcgaagacctggagaaagccctactcaccgtcgaagctctgtcggtagagtctgaggaggccttgcatgattggtaatgccctgggacagtccccattcatcccctatgcctcagtgccaggacctatgtttgaattcgagtggttcgacgtagggaatgccgtcatagagctagagccaggatggttagtaggggtagggtttggagtgaacagcttgtttgttcttacctacgtcgaaagggaaccattcgcagagtggctgccctggacccctaacctcaggtcatagattctctgccaggtggtcacaagtttctattcggtcgccataataatgaccctggggagggtcctacggaccgtcacgataacaggggaattatggccatgttaacagggcctataggcttcgtagaagccagtttagcttaggcagtaccctagtatggaaaaggccttgaaaaggccgtatgcgcgcccccagggggcctatcggggagggagtgggcaagtgccccctccccgtgtctaagccttatcaactggactcttcgagtccattccaacaggcttctacgaagccctataatcaccagtcatatcaccaatcatgcgcagagcatccgggtaggatggtcaagccattggtctctcctctctgtcaagaattctgtaacaatcactaggtcacgttgtgacccattgtgtaacagtcttcagactgtcattcgggcaggggcatttgcccccttcctgccctcctaaactggctggcttcgtcgaagccttcccatgccaccagcccaattatgtaacatcctggccatggtcatggcccattgtgtaacggcattgcatgccaggatcaccagacagtcccagctaggccaattgtgtaaccattccccatcccagcagcagaatatccccagccagtgtgtccttgaacggtagacggctctacgggggtttcaacccttttgaagcctggggactgttcgaagacctggagaaagccctactcaccgtcgaagctctgtcggtagagtctgaggaggccttgcatgattggtaatgccctgggacagtccccattcatcccctatgcctcagtgccaggacctatgtttgaattcgagagccattggtctctcctctctgtcaagaattctgtaacaatcactaggtcacgttgtgacccattgtgtaacagtcttcagactgtcattcgggcaggggcatttgcccccttcctgccctcctaaactggctggcttcgtcgaagccttcccatgccaccagcccaattatgtaacatcctggccatggtcatggcccattgtgtaacggcattgcatgccaggatcaccagacagtcccagctaggccaattgtgtaaccattccccatcccagcagcagaatatccccagccaggaagcccatggccctccccattgcatcctaggtgctcagccccgggaatacggccattgtgtaacccatgaccacccatgccctagtaggcctcttcgaggcgagctaatgccggcgtctctctaccctcacgggaagagttccccctttattatggcgaccgaatagagaatgcccgattcatgcggcctgtaggccattacaatggccagcccggggaaggattgcattacacaataggcttaccctcacccctggattgacaggcctcttcgaggctagccaggctcagacaggcagcctgagttacacaattcaccctcacatattgccccactccccatgccacacccctgacattcaaccccatgccccagcttcagcagatacatttgcttcgacgaagcctggatatttccagatcatgacggcgcctcatggccaccctcgggtcttgtt

SEQ ID NO: 18 - DNA, 66250 bp, Pbunavirus EPa20
  source 1..66250: mol_type = genomic DNA; note = EPa20
atgtacaaactcaatcctgcgctgcgagcggtctggcgaactcgcgcccgttacaaagtcatctatggaggccgggcgtcttcgaagtcgcacgacgctggcggtatagccgttttcctcgcggccaactacaggctcaagttcctctgtgctcgccagtttcagaaccgcatcagcgaatcggtctacacgttgatcaaggacaaaattgagaattcagagtacaacggcgagttcatcttcaccaagaactctatcaagcacaagaggaccgggtcagagttcctattctatgggatcgcccgtaacctgtcggaaatcaagtccaccgaaggcatcgacattctctggcttgaggaagctcactatttgacccaggagcaatgggaagtcatcgagccgaccatccggaaagagaactcagaaatctggatcatcttcaacccgaacgaagtgaccgacttcgtgtatcagaacttcgtggtcaagcccccgaaagattcctgcgtcaagatgatcaactggaacgaaaatccgttcctcagtgagacgatgcttaaagtcattcacgaagcctatgagcgcgaccgggagcaggccgagcacatttatggcgggattccgaagactggtggcgacaaatccgtcatcaacctcaagttcatcctcgcggccatcgacgcccacaagaaactcggctgggagccagccgggtcgaagcgcatcggcttcgacgttgcggacgacggcgaggatgcgaacgccacgactctcatgcacggcaacgtcatcatggaagtggacgaatgggacggcctggaagatgaactgctcaagtcgtccagtcgcgtatacaatctggcgaagataaaaggcgcctcggtcacttatgactccatcggcgtcggtgctcacgtcggttcgaagttcgccgagttgaacgatgccagccccgacttcaaacttatctatgatccattcaacgcgggcggcgctgtcgataagcctgatgatgtctacatgaagctgccgcacacgacgatcaagaacaaagaccacttcagcaacatcaaggcgcagaagtgggaagaagtcgcgacccgattcaggaagacttatgaagcggttgaacatggaaaggtttatccattcgacgaattgatttcgatcaactctgaaacgattcacccggacaaactaaatcaattgtgtattgaactttcgtcgccgcgcaaagacctggacatgaacggccggttcaaagtcgagtccaagaaggatatgcgcgagaaacgcaagatcaagtcgccgaacatcgctgactcggtgattatgtcggccattctgccgatccggaagcccaaaggcttcttcgatttctaaacacagaaaagcccggatcgctccgggcttcgggtcttactcggtatggttcctggcgctgagtgtcgatgcaacggcctcgccgactcccagggcttcctggccggccgcgagcgcttcggcttccgactcgacgatgaagtcatcaccttggccgtcgccgggcggaacctcgaccagcacggcttcgtcgccctcgaaacgcagatcataggtcttttcgacggacagaccgtaacgggcgttgagcgcatcccagagctgagcttcatagttgcgcaggtcttgcagagatttctggtggctgagcatcgccatatcgacggcccgttgcagggtttcgtccaggacgttgaatcgcatgcgaagagaacgaatccgctcgaccacttccgcatccactacatgcctttcgatcatcgcttttcacctttgctgaatgttacgttgtagccgttgtcggccagataggtcaaggcgccttcgaaagaagttccgacaaggtgcttgagctgcatttcgcgttgcgcggcgatccagaatgccgttccggagaactctgcgcggccttccgacaaaacctttccatcaggcccgtcgatccgtacatggacggaagatagcttcagcgccatcagtgaaccgtccctgtgaaggcgcgcgccgccgcgcattgatcgcaagggcactccctctggatgcgcgccaggtcgtttgcatccagggcgtagagttttccatctacggtatcgtgagccattgcgatgtccggatattcgttttcgtccaggccggatgccgcacggatgttgttccagatgccggcatgttccgcgcgatggcgcgcggtcaactcatcttgctctttgttcgccctttcaacgaatttctccaggagttcggtgaatttctcatcgatgactcgtgcagacttgacagagctgagtcgaatcgggtctttcttcatggtgattctcttttgctggtggttgttcgctgcccagacctattcaaagtctgggcagcatgatgaaaatgaacacgaaggctgcaaacgccaatagcgttcctgtaagcattttggcttgactctgcacctcagcgtactgcttagtggacattccgtgctgcgccgcctcggccgcgaagcgagctttcgcctcgataacttccgggcgcagcgacaggacatattctaaggcctcttcccgcgctttttcggcctcgaccaacctagggtcgcgggccgagacttcgctgtgccctggcctcgcgggatgggcctgcagcgatggcggaagttcggcggccacgactccatagtcggcgcaggcccaagcgatcccgatgaggatcgcgaggatggactggacgattcgcaacatcactttgtcgctaggaaagctcatgatcaatcctccaccgaccgaacgatttccatgttgcgaccggcattggtccctgcattgaaggcgcgccgaccgtcgctatcgtccagacgcatgagcttggtgacatccgacttcttgtagccaggatcgccgaaatgttcgtgaaccgcagcttccttcaccacaaccagagacgttccggcagaagataccagctccatgcgcttcctggttatggactgaaggcgatagctgatttcctgggtcgcggccagcttgaattgcgcggcaacctttacgttgaaacgttcgtacccttgcgccttctgatactcccgacacagacgatcaatggcctcgaccagggagttgaacatgttcaccgccagctcaacgtccgacttgtagcctttgaagcgtacggcatgaccccagcgcttggtagtgcttccgtcgcgggcgctcctggatgccttagccgatgctctgtggttgttgatgccaccggcgaaatccatgatgcagtcattgtacgtcgccacggccactgagaaaaacttcatccagttcgggattgcggaatagtaacgagtcgcaatctgctcgtcgaactcttcacgaatctcgccggtcgcttcgaagccgtggaggtcatacttgtccttcagcttcttcacgcgctcggctgcgatggccgcttcgtgcgggctggaggagtcggctgccatggcggtcagtttgcggatgcggtctttcgccttctcgatggcttccggggtgaattcgttctggtcggtcatggtcggctccttttgtctgaagggtttcgcatttcaatggagctattctgccttcattcagaatggaagtaaagcactttcttccactatttcggcatcgactggaagaaattccagatccaatcacctgctaccagcaagaggatgagggcggcaaagaacaagacagcggccgcgagctgtgcgcccggcttcagtttgggatggctgagcttgggctctacgggaacgcccggagtgctggcgctggaaccggcgtctcctgggccgtagccgattccacgttcacgcgcctggagcgacaccagggatttcagatactcggtctgcttttgcgactcttcgtagatgccggcgacggcgaaccagagcgcgaacactacggccgtgcatatgacccaggcgccggtcagcaggagggccagcggaccgatgaggaagacggaagcggccaggacgatggcgccgccccagatgatgaagccggccagaccattggtgatgtcgatacagaactttttcattttcagattccttcggttacgggatggaggggatttggaactctgcgccgccgagaacatcaatgacgacttcccagagcgtcggaacagaccactggtaacggtcgaagtcggtttcaggatcgacgcccagcgtcacataggaagtggcaggccatttatgaacactgcctttccgcatgagagtcgccacgcggccgtcaccgagcggattcgtcctgtgcggaacgtacgcagacatcgaatattgctgcccggcgtcgacaacaaatctttgcctctggcgcagacatacagagcccacaggattccagccgcgaccgccgcaagcctggcgagccgaagaatgctcataaccttcgtgagtcatttcaccgaggcaagccgagcgatcctcataatagttgatgttctccatcgatccaaccagcaccagagactcgaaatcgaatcgatgatcgtggatggccgagtgattgaagcaaagccgacgcggcagctccgggtgccaaacatggaggcgaccggccggaagttggacctgaatgaaccccaggccgtgcagagtgatcttgtccttcatcgggtcatggacggtgctcatggataatcctcagtagcagaaatgtattgtgagagttacgattgacaagccggtcgcccatagaagggcgaaccaggtcatggctttgatggtcgtgtagatcatccgaagaattttccggcacagatcgggccaatgcccatttcgatggatgcgtggttggtcaactcgcgaccgcagcaggagcactgaccagtcttccgaccgtaggcgactgccgattccatcggcttttcgaacatcttcagaacgtcgtcgtgctcagtatcggtgcagtcgcgactcttgatgaatttgccattggtgatccggccgaggtagatgtcgcccaggacgtacaggctaccggcgttccggctgtgagcgctagcctctttcacaacaacgatgagcggctcctcgccttcgccagctaggcggattttcgggcgcttgataccagactctttcgccttctcaaacgctttctcgatgccggaaatgtccagagtcggcgcagcagcttcctgcgcggccactttctcgcgatacttggcgaggttttcgatggcgcgcttcgcagcagcgatctgattttctgtcaaggagccgtatttatacaacgactcctgaaggctctgagcgaagctgaaggaatttccagtccaccactcgatgatgtccgggtgcgcggcttcgaaggccttaattttgaggtcgcgctcttgcgcagcgctacagattttctcgatgcgcttttctgccgccttagcacggctcttggcgcgctgctccgggctggttttgtactctttgtatccgacgccgccgcaggcaaagcaggcgcgaccataagacgaagggccacggtacaggccggtgcctgcgcatttggtgcacttgtcgcgatatagcttcacttccttccgggagttcgggcgggcgcccatggacacatcttccagcgtcttcggcgcttcgtcggtgatcgctacggtggcgaagtcatcgcccaggtcttcgaagccggtgaacagattctctgctgcgttcatatcgattctcctgtttggaaagttcgttcgatgagttgactatacgccagaaatggaaaaacggtagcgatttctcactaccgttcgtcgggtcgaagacaatcaataaatgtcgctattgatcttgaacccatgctcagcgccgtcgttgtagtcgtactcaacataactgtcgcagtagtcgttcaaatgctgaatgatgcctagaacgtcgttcgcggccttgtgtcttttcgcggcgatggtcttggcgatgctgtcgccgacttccagggtttcggccgtccggcgatggatcagcaggcgactccaaagatagagccggacgcgacgaatgatgtcgcgatggcgctccagtcgtccgtgcaactcttcaatttcgtgctcgcgggattttaatactcgtcgaagctgttgaacttccaactccaaatcggccttagtagccatgttcacctcagaaaggaaaatcgtctgagactccaggaagctcgacgattattgttgagcctgatcggtctagaatgcatccgaccgagccagccctgtgtggatagggtctacacgaactataacaggtgacttccctgactattcgccaggtcgatcctccacaccatctgcaaattggcgggcgcttcgacttcagttttcgttcgtccaggacggcgcgtctgtcgcaggaaaggcagcgtgccttaaccgacgtaaccatgggtatagtcgatcattcggatgagctcatcatcctctgattctctcgacttcagaccgcccaaagagtccgactggccgtcgcatttcgcatcgatatccatcgaagacaggaatcctgccgatactgctgtgatatcaactttgtcgccggacttcttgaagccttcgcactcagcatcgagggccacaattgcactcgcggccatgttcacatgactgatgaggtcggggaagatcacagaaacttcacgcgacatgccacggaccgtcagcttcaggactacatacttcatactcactatcccttttgtatgtgaggaaagaacttgctgttttccggatggtgaaaacgctcggtcgcaggcggtctttcttccggacattgaatcgtcgaaggcgggaaaaccgcgccggcgataatcgccgcgaggagtgcagcggatgtcgacatccagagggcggtttccaggctcacccgaacttccggacggcgcggcttcattcgctccaccctcttcctggctcataggatggcagaccgccgccgcgaatccaattgtcccacatacggttcagaccagtcggtggctggggcggcggactgtagaatccgggagtctcagtgctgctcaggaaataaggcgtgcaaacggcctggacgaccaattggtgccgctcccacatcttatcaatcgctcttagcatgacgtcttcgcactgagctttgctgtcgaaccgtctgctggtatgatccggcatctggacacagccatcgccagtacaaagaaaagcagtggcgatccatactgtgatgctttccatatcgtcaccctctttggtaggtgagcagattctattccatctgctcgtcagaagtaaagcgcttttcgtcgggataaatgccgatgatgtccgcgtcaagcatccaaatgtcaacggacggatcgttgctttcgatctggtacaggtgatacagctctttctcgtcacgcgccgattcgccgcgaggttcgacagccaagatacggccgtacccttctccatgctcatcgcgatacatgacgcgatccccgactttatagcggtctcttttaaagaggcgcgagcgcgagctgttcggcgattccactacccaggaatcaacaaccgcgtctttcacattgctgtaccacttcgcagatttgtcgcagtcgaacacgcccagaacttcgccgtctttcaacacgatatgtacgattggcaaaagagtattcatgtttaatctccattggttgataattagagtctaatctgccgaaaagttcccgtaaagaattattttctcataactgattagttgcaactgttaatctgatgtatatgtttgaatctcttttgaacgtttgatgtttcccctataataagcgcacacagccaacaaccacgtggaactacaatgtttaaactttcctggatattcgggcgcaaaaaggataatgctgcctgttctgaatcggcgccggagaaagtcgcacaaatccctcaacacgatccgctcgaccccatgatcaagctgggaaggattcgcggctggaacgtcgagccggagaaagccccggtaattcgtagcgtgaaagatttcctggagccgggcctatctgtagcaatggatagtgcgtatggtgatggaccaactccggcagcgaaggctgctgcgggcggccagaatccctatgtagtcccgactatgttgcaggactggtacaactcccaagggttcatcggataccaagcttgcgcaatcatttcccaacactggttggtggacaaagcttgttccatgtctggggaagacgcagcacggaacggatgggaactcaaatcggacggcaggaagctatccgatgaacaaagcgcgctgatcgcccggcgcgacatggagtttcgcgtcaaagacaaccttgtcgaactcaacagattcaagaacgttttcggcgttcgcatcgcgctgttcgttgtggagtctgacgatccggactattacgagaaaccgttcaacccggatggaatcacgcccggctcctacaagggaatctcccagatcgatccatattgggcgatgccgcagctcacggctggctcgacggccgatccgtcttccgaacacttctatgagccggatttctggattatcagcggtaaaaaatatcaccgcagccacctagtggtggttcgtggaccgcagcctccagatatcctgaagcctacatacatcttcggcggtatcccgctcacccagagaatctatgagcgcgtgtatgcggcggaacggacggcgaacgaagccccgctgcttgccatgtcgaagcgaaccagcaccatccacgttgacgtggagaaggccatcgcgaacgaagaggccttcaacgctcgcctggcgttctggatcgccaaccgtgataaccacggcgtgaaagttctgggaattgacgaaggcatggagcagttcgacacgaacctggccgacttcgacagcatcatcatgaaccaatatcagctggtcgcggccatcgccaagactccagccacgaagctcctcggcacttctccaaaaggattcaatgccactggtgagcacgaaacgatttcttatcacgaagaactggagtccattcaagagcacatattcgacccacttcttgaacgccactatttgcttctggcgaagtcggaagaaatcgatgtgcagctggaaatcgtctggaaccctgtggactccacgtccagccagcaacaagccgaattgaacaataagaaagccgcgaccgatgaaatctacatcaactctggcgttgtgtcgccggatgaagttcgcgagcgtctgcgtgacgatccgcgttccggctacaaccgactcaccgacgatcaggcagaaaccgaaccgggcatgtctccggaaaacctggccgaattcgagaaggccggtgcacagtcggccaaggcgaaaggcgaagccgagcgagccgaagcccaggcgggcgccgtagagggcgcaggcgcccctgttcccgccgctccacgcgggactaagcctctcgcgaaagcggccgaggaaggggccagcgaggtcgctgaaccgccgtcgcggccggaccccaaggccgagctgcggaacttgttggtcgatcttttgtcgaagctccaagacctggacgacattaaggcaccggatggcgtagacatagagcacaatgatgcgcctggcttaaagcgcacgtccaaacctggcgtgtctggcatggagccttcggtgttttcgtctaaccgcatcgtcgggcctcgtgatcattcggaactccagagaatcaaggtgaatggaataaccaccttgatcgaaaatccgcgcggaagcattcggcaaggaaaggatgggagttggcgagttcagatgaaacaccactacgggttcatcaagggaacgaaaggcgctgatggggatgaagtcgattgcttcgtcggtccgaatctgggatccaaacgggtcttcgtcgtcaaccaggtgaacaaggaaggtcagtttgacgagcacaagtgcatgctcggcttcaacaacatcaacgatgcgaagtctggatatctgtcctgcttccgtccgggctgggatggtctcggctccatccatgaagttgacctgcccgctttccgtcgctggctggcgaacggcgacaccaccaaaccattcgggggcgagtgatggcattcaaggcctccaaaaagcgcgagcgccgggcacctcttccagtcggaagagggaagcccataattccatcagcaggaatcgaggcctggtatcgaaagcagatgaaggatatttccaagctcatgatctccgactatcgaaacgagattgagaaggcgctgtcccagcctgcggccgaacggttcttcgccagcgacgaatccgtgaacgtcctgttccagatgacccttcgaagcctacagcagcgatggagccgcatttttgaaggcttcgcggccaagatcgccccggagttcgtcaaccggaccgaagaagccgccaccgccgcgacccttcacagcttgtcggtggccggcgtcgatcagccacgagctgcgtataatgagagcgtcaggaacaccctggaggccgcaaccacttacaatcatactctcatcaccaagatccaagaggaagtccacgagaagatttacacatcagtaatgctgtctctgacttccccgaatccggaagagcaaggagcttccggcataactaacgcacttcgcaaagtcgggaaattttctgaagatcgaatcgaactcatcgcaagagatcaaaccagcaagctttacagttctctgagcgatgagagaatggcggaaaatggcgtcgaggagttcgagtggctacactcttctgccggcaagactcctcgccacacccacctggagaaagatgggaagaggttcaagctgaatgaccccagactttgggagggtccgaaagcagaccaggggccgccaggatgggcgattaactgtagatgcagaaagataccagtcatttgacatcgataggagcgctatatgccgttagttcatggcacttccaatgaggctcgttctgaaaacatcaagcgggaaatcgaagccggtaaagacccaaagcaggctgcggccatcgcttattccatccagcgcagtgagaaagggaagacggcgaaagattgttcgcctaagctcgtcgccgatcttcgcgccctggtggacgctctgtcgaggctcgtgaaatgaaccgcaagacgtgccggcgccgactcgtggtcgatgtaatcagggccaatattcacggcggattcttcagcctgaagtttgccgccatcgatttggcaatcatcggcttcgccatcttgatggcttttggccgataatgctgagaaaatctggattctgactaaaaattctagtccggatagccgcaaattaccgtttacggaaaatagcagtaatttggaaatcctactgccgcgaggctttaacagagccagttcctaatttccgatttagccgcatgcttcaaaagtatatagcctgggaaattagaagtaacgttccaatagaattcatctataagtaacgctataatataacgtcaatctatatactctagacgtattgaaattcaatttttaatcggtaaattggtaatttgaattagtttaggagttgaaagcctcgcggcagtaggcttagacaaatcccgtcaagtttccgagaccaaattaccggattttcgcggctgaggaaactggtaattagatcacaatacaaattataatgtaagttaacagtcgcggctacatctaattattgttccgcttatttacccttagatgtactgcgtatataatacagccatagtccacgactcttcgaattaacgatggcaaagtcgaaaagaaaaattgacgaaaatggatatatgaccatagagggctgcccgatcagctcttatggcgttttccaatattctgctggtcaactcggtcttccgggcgatccgacgcggattgtcaacgtatatcgcccggagtctgccgttagcgatccggagtacatcgaatctctgaagaatctcccgttgatcgacgagcatgagatgctgtcgggattcgacgatgatgacgatagcgtggcccccgaagacaaaggggtggagggcatcatcacatccaacgcttactacgaagccccatgggctcgcggcgatatccgcatctattcccgcaacatgcagaatcagctggaaaggggcaaagaagatttgtccctaggctatagttgccgctacactgagcaacccggcatctggaacggaacgccttatgaagtcgtccaggacaagatgcgcggcaaccacatcgccctggtaaaagagggtcgtgtgccgggggccagagtattggatggtctgtgttttgaccatctcagttttgatttcagaccatccgatgagggtaatgaaatgagtctcaagaaagccaagcggaagccccctgtccagcgcgtagggcaagctgctgactcggcggtcgaagagttgcgcgccctgtggccgaagctatctgcgtctgtccagaagttcctgggcgaagaagagcaggagccggagcatcaggaaggcgcagctccggccgaaccgaccgacagcgagcacctgaccgagcatccgactctggaaggtgctcagaaggatgacgaagagcaggaagaggagccttccgttgtcgatccggccgtggccgccgtcgagccggagcatcaagaaagcgccgcatccgaaatgtccggtgaaggcgaagtcgccgaactgatctctcaggtcaaagccattctggctcgactggagggcacggtagccgaaggggcagacgaagagcatggcgaaggtcaagatgtcgtcgagggcttggaggagcagagcagcctcagcggctcgcaaaccgccagcgacgatggtggtgagagcaaggataacagcgaggaacttcctgaaatggcacagaagaacgcgcaagatgctgcaattcgcggtctctatcgcgacattgctgctaaagatcgcctctacaagcgtcttagctccgtggttggtgcgttcgatcaccgagctatggactcggctgaagtcgctgtttacggcgtgaaaaagctgaacatcagctgtgcgaagggccaggaagctctggcgctcgacatgtacctgaaaggcgtcgaagcctcgcgcggcgcggccagccgtcaatcgaaagcccaggattcggccggttctgctccgcagtgcgccgagctggacagctacctgaagggggagtaactcatgttccagaaacaagtttaccgccagtacactcctggttttccgggcgatctgatcgaggacggcccgaagcgggcgcggccgggtcgaatcatgtctctgtctgccgtaaatccggctgccaccgccaccggccccaaccgcatcagtcgcgctttcggttacgccggtgacgtcagcgccctcggcgaaggtcagccgaagaccatcgcggctcgtgcttctgaagtcgtgatcggcggcgccaacttctttggtgtcctcggtcatccgaagcactatgccctgttcggttcggccggagactccctggctcccagctatgatctgcccgatggcgccgaaggcgagttcttcgatatggccaccggcctggtcgtcgaaattttcaacggcgccgcaaccgccctggacctggactatggtgacctggtcgcctatgtccccaacaacctggctaccgccgacaacgcgcttggcctgccggcaggcgccctggtgggcttcaaggccggctccatgccgaccggcttggtccagattcccaacgcacgtatcgttaacgccatcagtctgccggctcagtcggcggggaatctggttgctggcgttaccatcgtccagctcacgcagtaaggaggcgtcatgagccagatcagcaagacccattcgcgcctcgcaggccgcaatgcgaaacctttcgacctgaaaaacatcaccaatgacgccgtggcgtctctgcgccgcatcggcctggtattcgatcacgccgtcgtccaggaccagatcaaggccttggcgaaggccggcgcgttccgctccggctcggccatggacagcaacttcaccgccccggtgaccacgccgtccatcccgactcccatccagttcctgcagacctggttgccaggcttcgtgaaggtcatgaccgctgcacggaagatcgacgaaatcatcggcatcgataccgttggctcctgggaagatcaagaaatcgtccagggcatcgtggagccggccggcactgcggtggaatacggcgaccataccaacatcccgctgaccagctggaacgccaacttcgaacgccgcaccatcgttcgtggcgagctgggtatgatggtgggtaccctggaagagggtcgcgcctcggccatccgtctgaacagcgccgaaaccaagcgccaacaggcggccatcggtctggaaatcttccgcaacgccatcggtttctacggctggcagagcggcctgggcaaccgcacctatggtttcctgaacgatcccaacctgccggcattccagaccccgccgagccagggctggtccactgccgactgggcaggcatcatcggcgacatccgcgaggccgttcgccagctgcgtattcagagccaagatcagatcgatccgaaggcggaaaagatcaccctggccctggccaccagcaaggtggactacctgtcggtaaccacgccttacggcatttcggtttcggactggatcgaacagacctatccgaaaatgcggatcgtgtcggctccggaattgtccggcgtccagatgaaaaaccaagagccggaagatgctctggtgctcttcgtcgaagacgtgaacgcggccgtcgatggcagcaccgatggcggcagcgtgttcagccagctggtacagagcaagttcatcaccctgggtgtcgaaaagcgggcgaagtcgtacgtggaagacttctccaacggcaccgccggtgcgctgtgcaagcgtccgtgggctgtggtgcgctacctcggcatctaacagatgcctattcaccaaaggccgggcttccggcctttgttcactctgactctaactcggttgtaggggccggttagggcataattactaggactacgccaatgactgtttatatcgtttcctccatgactcaatcggtgtcttacaatgcgtatgacacctctgatccgtccaatcctcgcctccagcgaaagattctgattcgcggccgcgcaggcatcgcatccgaaacttccggcttcggcgacatgatttccgacgaggccggacgtccgatctggaccccacagggcgattgtactgccgtgagcgattcggatttcgagctgcttcaggccaataagattttcatgcgtcacatggagaagggttatctgcgagtcgtgaagaccgacatcaccagtgaccaccagcggatttccaaagagactcgcaccatggagcgcgatggattccagcctctggatgctactcgcctgcagcagaaaatcaaggtgaccacagccagcgcttcccaggaacaagagttccggatttaaccgagggtttcggtatggtgattttcgacgaacataagtttcgcacgctgtttccggagtttgctgatccagccgcttatccggacgtgcgcctgcagatgtacttcgacattgcgtgcgaattcatttctgatcgcgattcgccataccggattctcaatggtaaagccctggaagcctgtctgtatcttctgaccgcccacctcctgtcgctgtccacgatgcaagttcagggcgcggctggaggtggcgtcactgccggtgggacccagggcggtttcatcaccagcgctactgtcggcgaggtcagcgtggccaagctcgcgcccccggccaagaatggttggcagtggtggctttccgggacgccttatggtcaagagttgtgggcgctcctcagcgtcaaagcggtgggcggattctacatcggcggtcttccagagcgccgaggcttccggaaggttggagggacgttctggtgatccctggtgcgaatcttctgcgaatggccttcggggtcatcggtactcaaattgtgaaatatcgcaagtttgagcagcgagtgaagaatgatcaagctcagtacgtttccatgttcgaggagcctttcgacctggcagcgtctgttcagcgagtccgacgcgatcagtatgtccagtttaatctggagttccaacggaattacgttatgatcttcgccaactttgagatggttgacttggatcgcgatgtggccggtgaccagttcctctggaccggaagagtctttcagctggagtctcaaggctcctggttttatcaggacggatggggagtttgcctggccgtggatatcggtgcggccaagctcactgatgacgggaaaccgactttctaggtgatgtatgtttgacggcgaactgatagcgaaactggttgtcgagttgaatgcggcgatgacatctgctcaagaggctttgcagttcccggattttgaagtcgtccagaaagctcagccgacccaacagggaacgtcaaccaggccgaccatctttttccagaaactgtttgacattcctcgcggctggcctgccaccgattggcacctggacaacacggcccgcaaatatgtagaaataactcgacagcatgtagagacgactttccagatcagttcccttcattggcagaatcctgaaataactcacgtggttacggcttctgatatcgccaactatgtgagggcttatttccaagctcgatccacgattgagcgcgtaaaggaactggacttcctcattcttcgcgtgtctcaaatttccaacgaagcattcgagaacgacaatcaccagttcgaattccacccaagttttgacatggttgtaacttacaaccaatatattcgcctgtacgaaaacgcagcatattcggccgatggggtattaataggcatatgagtctgaggcgcgattcagagctaatcgccgcgcacctccagatgttaagagccatgcgcggcaggtccgtttcagccggatggtattccacggctcgatatcctgacaaggcaggcggatcggtcggaatacaagtcgcgagaatcgcacgtctcaatgagtacggcggaactatcgaccatccgggcgggaccaggtatattagggacgccattgttcggggtcggtttgttggcgttcggttcgtcagaaacgactttccgggagaaaccgaggtaactaagcctcacagaattaccatcccggctagaccgtttatgcgatatgcttggaacttgttttccgcagatcgcgccgcaatccagaaccggatagccatgaggctggccagaggacagatcactccagatcaagctcttgcccagatcggcctggcgttggaaggatacatagccagaagcatcaggaccgggccatgggtggctaactcagcatctacggtcaggagaaagggattcaacagaccgctggtcgatacggcgcacatgcttcaatcgattagcagcagagtaacataaccaggagatcatccagtgatcagtcagagccgttatatccggatcatttcgggcgtaggcgcaggcgctccggtcgcaggccgaaagctgattctgcgcgtcatgactaccaacaacgtcatcccgcccggaatcgtcatcgagttcgacaacgccaacgcagtcatgtcatacttcggcgcgcagtcggaagagtatcagcgggctgcggcttatttcaaattcatcagtaaaagcgtgaattcgccgtccagcatcagcttcgctcgctgggtaaacaccgccatcgcgccgatggttgttggtgacaatctgccgaagaccatcgccgatttcgccggcttctcagcaggggttctgaccatcatggtcggcgcggccgaacagaacatcaccgccatcgatacgtccgcagcgacttctatggacaacgtggcgtcgatcatccagaccgaaatccgcaagaacgccgacccgcagctggcccaggctaccgttacctggaatcagaacaccaaccagttcaccttggtcggcgccaccatcggcaccggcgtcctggctgtggcgaaatctgccgatccccaggacatgtccactgccctcggctggtccacctccaacgtcgtcaacgtcgccggccaggctgccgatcttcccgacgcggccgttgccaagagcaccaatgtcagcaacaacttcggttcgttcctgttcgccggtgcgccgctcgacaatgaccagatcaaggccgtgtcggcctggaacgcggctcagaacaaccagttcatctacacggtcgcaacttccctggcgaacctcggcactcttttcaccttggtgaatggaaacgccgggaccgccctgaacgtgctgtcggcgactgctgccaacgacttcgtggagcagtgccccagcgagattctggccgccaccaactacgatgagccgggcgcttcgcaaaactacatgtactaccaattccctggccgcaacatcaccgtttccgacgataccgttgcgaacaccgtcgacaagagccggggcaactacatcggcgtcacccaggccaatggccagcagctcgcgttctaccagcgcggcattctgtgcggcggtccgaccgatgctgtggacatgaacgtctatgccaacgaaatctggctgaagtcggctatcgctcaagcgctcctggacttgttcctgaacgtcaatgcggttccggcgagcagcactggcgaggcgatgaccctggcggtgctgcagccggttctggacaaggcgaccgccaacggcacgttcacctacggcaaggaaatcagcgccgtccagcagcagtacatcacccaagtcaccggtgatcgccgcgcctggcgtcaagtccaaaccctgggttactggatcaacatcaccttctccagctataccaacagcaacacaggcttgaccgagtggaaggccaactacacgctgatctattcgaagggcgatgccatccgcttcgtcgaaggatcggatgtgatgatctaatggtttgcggcggactcgatccgccgcgaccttccataaatggagtgaggaataagcaatgatcaacatttctgcgttcggctcgatctgccagttcacggcaagcagaactttcccgaacggattcaccgtcaccgagtttgccgacgatgcggaccccatcgacagcccgccgttcactgcggccgataccggcgtcggcctcaacggtgacatggtagtctggaaccgggcgaacatcctggaagtcgtcgttaacgtcattccgaataccgagggcgagcgcaacctggcagtcctgctggatgccaaccgcaccggaaaggacaagtcgggcgctcgtgatgtcgtcggcctggtcgtggcgatgccggacggcagcaaaatcacctgcaccaacggcaccccaatcgacggcgttctgatcaacgcggtggcaagcgtcggccgtctgaagaccaagccgtatcggttccgatttgaaaaagtgatcaaagccggtactagctgatgaagaaaattccgctgacagcagtccccaatcaagcgatctcatttaacgccggtagcagctattggaagattcgcctgtaccagaacatggacatgatgaatgccgatatcagccgcgacggcgtgatcgtttgccatggggttcgctgcttcggcgggattcctcttctccagtacagccatcagtaccgacctgactatggcaatttcgtcttcgaccgcgacgccgattggacattgttcggcgacggcatcaacctgttctatctggacggcgccgaattcgccgagtatcaggcgcttgccacgaggaaagaatgagcacatcaacgatcagaaccgggacgaacaacgatatccttttggacgacaatggaaacatggttatcctcagggatgtcgaagcgtgcgcccaggacgttcgggcggcgatgctcatgcgcaccggcgaaaacattttcgatgtgaactccggcgtgggatatttcgaatacatcttctcgccgcagaaaagctatgatgacgctcgcaaatccatcgcggatgcaattttatcctcgccggatgtgaccggcatcgagcagcttgacatcgacataaccggggaagtcttcggcgtcgatgcgaaagtcatcaccatccacgggcctgttaccacaggagtttgaaatgagtaccatccgcatccaatacgccaacggcacccaactgttcctggacggcaaaaatccgccgcccctggacccgctgccctcgtttaacccgtctgtcgaagatctggaaggcctggaccgcgaaaagaacatcgacaagggcgactcctcgccggccggtcttcccgttcccccggtaaacgtcgattccaatgtcgacaacggcggaaccatcccggctccggtatcgaccgacgctgctgcggccgaatcggccccagaaggcgcccaggaagctcctgcagcaggccaaggcgacgagaaaggcgccgaggaagccccgactacagccccggtagaaaaggccgaggaaacggcctcgccggccgctgaagaggaaaccccggctcccgccaaggccacctctcgcaaaaccaccagcaagtaaggactcgacatgatcaacgtcagcggcttcggcacaggaattgtaatagtttcagcctcatcgttcccgatggggttttccttgtcgaagttcgctgatgatgagagtccgatatcctccaaagagctggagccgttcggatatgagatgctttatgacggcggcctattcgcctttgacaaggctgctcctctggaagtatctgtatccgtcatcgcagggagcgaggatgatattaaccttcgcatccttctcaattccaaaaagggatcattcagatttcttccgggcagcatcccggatatgacgactctcgtggccactcttcctgatggcggccgcaccgttctgtccaatgggactatcatcaagggtccggccatcgacaccatacagaacaccggacgacgcaaaggcaacacgtacacttttgttttcggtagctatcttggcgcccagactgcgcgtcaagccatttctaacgttatccaatcggtgctggaggtggtctgatgttggggattttcaccagcctcctaagttcgcgatctttttcgattgtggaccaaaacacaaaccagctagttgctgcggatttgaggataagccgggtcaacacccggttttcttctgtagggcaacgccacatgctggaagatggtacgaccaagatggattccagaacgatccaccctatggaaatcatcgtcgaagtattttgcccttcaattgatgtcgtcgatcagatcaatcaattgctcctggatcgcgacacactgtacaaagtcatcactcgcggcatggtattcgaacggatgatgtgtaccagcgaagcgctcaatcagactccggatatgatatcggcgactcctgcgcggctgacattctcccaagttctcgtccagaatcccaagcctataatgttcagaaatgcaggggactcttctatgatcgaccgagggctggccctagctgaagacgtggttggctcggccggcgatctgttcgactacgcagtaaacggcgtccagaacgccgcagacttgttctgaggtgccaattgaactctttcctcaagtctattctcaacacgcctactctcaccatacgcaatgatgttaccaaacttcctgtctggaagagtcttcaagtcaagaaagtggaaatttactcgccggcttccgtagtgtcgaaacctctggcgacgaaagaccagacggaagctcaagtgtacaccgaagctctggacattgatgtgaagaatggaaagatcatccaaccggtgcgactccgcatcaatgctatctgtccggacctgtccaccgttgaaagtatcatgaacgctttcaatgataacacctcgactttcgctatcacttctaagtcgatattggccgataaaatggccatcatggcgctcgatgtggatcagtctccagacatgttgaacgcggctgagatcaatatggaattcgagcaggttgagcctccagtattgaatgaattcgatcctgcgttccctcaagatagtccgacttatggggtacagattcaatctctttctgatgctaatttgctggatttgggcgccatcggcgattcgatatcttcggccgcaaaatcgctatataatcgcgtgaccagctacttctgaggatgtatcatgcttgaaatcaatcttcccgatggccgtcaaactcgcgtacaaatcgaggcgtggtcggcattggatggctgggacctccagcgccgtttcgtcgaattcgctgtcagccaagattccgacttccgccgctctttcaccatggaaatcctgggctatgcgaaagtgctgcttggcgacgatgacgccggcattccgctgaccaccgcggcagtcatcaacaaccacctcggccactggaagaacgtggaactggttttcaactctgttctcaagcacaatggcatcgacccggccacgcacgccgaccggccggactattgggaacaagtcggatcgcagatggccatcgcatttctggccgaggcgtccaagctcattggtccagcaatgaagatcgccgaaggactcgccaacaagccggagtgattcatgtctagtgatttggatgaattcatacttcggtatgaggccgatactgccagagccgagcgcaatctggagcgcctccagaaccagatcaggcgcgtgaacagcgcatcgacgagtggccttcaggatttgcgccacttcgcagacggcgcggccaccgaactcggcagagtcgttccgcagattgattctgtgacgagcgcaattcgcggaatgaacgcgcaactggcaataggcgccactggcgtggccctggtcgcggccggcgtcaaggcgttcatgaacaccagggaccagtacaatcagcagcgcatccaggcgatggacatcggcatcgccccggcacgcttggaagagtaccagagaaaattcgttcgccagtccggtggaaccatcagccgcgagcagggcgcggagatgaccaaaaatctggcagacactttccggcgtgcttatcgcgatatcgggcgagtcggcccggaagcgcgaattctgcgtatggccggcgtcgatgtcgggagcttccaaaagggcatgcggccgctcaacgacatcatcaccgatctggccacgaaaatggccaagctgaagccggacgaaatttctgcctacgctgatgcccttggcgtctcgcgagattacctgagcaccctggcgaagatcggcccggccatgggaaaagtcactgagatgacgactgcggaactccagtccagggtccagggcgagtccaacatccagaaattcaacgatgccctggcgaatctcaaccagacgttcactaccctggaaaaccgagtcggcgaaaagctcgcgcctgcgttcaccaagctgatcgaaatcatcgacaagatagtccaggctattcccaatgaagtggaaagcttcgcgaaggacaccaaatcccgttgggaagatggagtgctcgggaaggcgaccgttggcagtgatatcctatccctcctcagccccggcgccctgctcggtcgcctggcagcgtgggggactcgtcgcggcatggaagaatcagggctcatcgacagggacaaggttcccggcgctcaaaccagcgaagacctggccaagaaacaagaagaccaggacaaggctactaagtccatgaaagagctagagaagctggctgaccagaccacgaagtctaccaatgattttgcggtggcgatcaacatgttcagtggcgcggtatcgtcgttcgcgaatgccgttgacgagcgccaagcttgggcagcctgggcgggggaaattggtcgggcggtcggcatgggaagcaccgcgccgacttcgcgggccaccggcgtctatccgcacgcgatctatgatcagtcgaagagtggcgcggccggacaagtcttcggcgagccaatcggcgcccagtctcttcgcaatcgcatgttctcgccgcagcgcaaggcagagccggtcaccgttccatcgtacatcaacgatatcatcaaagatgcttcgaagatgtacaacattcctgagctggacatcaagaaactcatatacaccgaaagccgattcaacgccagggccaccagcgaagccggagctaaaggcctcatgcagctgatgccggaaatcgccaaggcgtatggtatcactgacgtatatgaccctcgccagaacatcctcggcggaacgcgcctactgcgggaaaacctagatcgagcaaatggcgacatgcggttggccttgacatactatcatggcggactcgatccgaagaactggggtccaaggactcgcgcatatccgggtttggtaatgagcgctccaatcgagctgatggaagaggctcagcgcaagcagaaggctgcggccatgaccgtcgccaacgagacgttcgccccggaaggcggcgacatggacattcgtccctatgatggcgggcgactggaaaccccagaccagggcaagaaggaagatgagcgccgcgaagcccgtcgatatgacgacagggttgtgcgaccggaaattcgcatcatcgaccgcatgccagaccgcagcgacggcgaaatccttaagatgtctagacgtcaagaggccgaccgggcaggttctggattccggaagttcccgaatcaagttcgcggcgagaccaagcagaacatccaggctcaactcactgcaggagccatcgcgcaagtgatcggcgttaaccccaaccagatcatgcgccgcgaaatcagccgttctgacttgctgttcggatacaaccaagccatcctgggcaagcaacaggagatcaaggccgccgcgaccgaagccaacaacgtattcctgtctccagccaagcttgccgaagccacggccaaggtgaacgccgcatcgcgagaaatggatattctccggacgtacggcgagcaacttctgaagagcgctccagagcgcggccaggagctgaccatcggtcgaatcgacatgttggtcaacgtcaccggcgcgaattctccggaagaggctcgcgagatattcagtaagcagactgcagaccagctgactacggcaatccaggatgctcaaaacgattccgcaactaagatactctactgatgaaaaagagaattctgcgagtaacattcaacatgccttatggacccgaagtcatccgcgaagatctggatgttcgggtccggattatgaaggctgcgttgcggattcagaaccgggcgacgatggaaattttcggcctcaccactcagcttcgcgagtctcttctgtcgcagttcaccgcgtggaagcatcggcaacgtcaagtgggcagggaagatgaattgatgatcaaggtgtcggtggaagccggctactctgaccaggggcgcgagcaagtttccagagtctttgtcggcgaagttgccattgtcgatatcatttctccgccaccggacattggaatccgcatccagtgctataccaggcaaatcgacaggacgaagaccattcggaatatgccgcccgccaacacgacgtttgtcaagttcgtcgagtggggcgcgaacgaaatgggattgaacttcatctgcgataccagttacaacgatcaagttctgaagaatccgggccggtctatcactgtcgcgtcggcaatcctggcgtcgattcaggacatgtacatgccggacgtggccgcgttcgtcgatgatgacatattgatcgtgaaggaccgcgataaagtcattcgtccggatgaggtgaccaacgtcaactcgtttgttggtattccatcttggtctgaatggggcgtggaattccagtgtctgtttgagccatcgattcgcgtggctggaggcgtggcggtcgaatcgctcatgaacccaagcgtcaatggtaactatgtgattactgctctggaatacgatttggccagtcgtgatcggccgttctatatcaaagtaatggggagtccagcggcataatggccagagaaatcaaatcattcaacatgttcggagtccactatacttcgcggcaattctctgctgtcgatgggctcggcatgatgtcggaaattcagagcgtgccgccagaagaattgctcaagtgcaccgatgtattggcgcatccggaagaccatccggaaggcatctggcttccattgactgctgcgaacatcaatctttatgtcgttgatcgagcgaaagtaatagctcccgtacaagttcttgcacttctgtccgaagtggtaatcgactggaactttggttttctcaaagactggaccggagtcaagattccatccagatttgtcgaagacatcaaaagcgtgaagacggcacattcaccttctgtagttgcgagcttggtcgcgaacggctcagcctctatgcgcgagttggaagagtattattcgactcaagatgcgttcaagatgatagacatcatgacggcgaagagcgtgaacgaggccttggcgtccgaagcatcgcacaacagaatcaaaaagggataattcctaaccgggcctgggaaggctatactagacctgccaaatcagaggctttcccatgtccaatatttctctaacatccgcaaaagctcccgacaggacgcgactgatcgccgctcttgacgctcggtcgcggcgggatgctctagatttcgaagtaatgataccggctcaggttgttcaatatgacagggccgagaatatcgcgacgattcaacctctcatcacctgggttgacacggaacacaacgccgtccaaaggcatcagctggttgatattcctgtaatttccatgggggctggcggcttccacataagtttcccgattcagcaaggtgacataggctggatttatgcggccgaccgcgacacgtctcagttcctggagtcgttgtcaatgtcgaagccgaacaccggccgcatccataagttcgagcatggcctgttcatcccggacgtattccgtcgatacaccatcaattccgaagattcggccgctatggtcatacaatcgacttccggagcgaccagaatttcgattcgcggcgacaacatcaagatcactgcgccgtcgaatgtcaccgtggatactccgcaggcgaatttcactggaagtgtgactatcgccaacaccctggttgtaaacggcgtcaacgtgaacaaccacggccacctcgaaaacaacccgcctgatgcccggacgaaaggcggcatgattgcttaaggagattttcatggcaagttttgatttttctgatttaacagcgggggggggttgtaatggctaactacaactacatcgtcgatactggtgtgatagtcgcagataccgccgacgttctgagcgacgttgaggccgagttccgcgccgccctcggtgccaatatcaacttggccgcgagcactccgcagggatcgcttgtcgcggccgaggccatcgcccgttccagtgtcatgcggaatgaagcgcgaattgccaataccataaacccgaacgtttcattcggaacgttcctggacgcgatctgtgccttgatggggatcgagcgcggttctgatctgtcaaccttcggctatggagttcaagtcaccggccgcagccaaacccgcatttccaccgggtctagggtccagactccggccggcgcgatcttcacagtgatgagcgatgtcacgatccctgctggtggtgtcgcgaccatcgatatcaaatcgcaggagtatggcaacattcctctgccggtcgggaatctaatcatcatcgacggaacaattggatggtccggagcaaaagtcatcgcctccactcgcgtcgatccgggcagccgccaaatgagcgatgcagagttgaagaatgcccgcgttaatcgattggccatccaaggccgcaactcgactatggccatcaaggcgtatgtgagcgccgttccaaacgtcacgtcggtgaacgtaatcgagaacaacaccggcgccgttcaagtggtgaatggagtctcgtttacccttccgtatgctgtttgggtctgcgtcgccggaaacccggataaacaagcagtcgccgatgcgttgtgggccgcccataacggcggaactccatgggactatggtgcgacgaacaacggcgtcccggtggacggtccgaatggcgttcctgtgcgcgatccggcgtccggtcgaaagtatgtcgtgaagtggaccactccaattatgtacgatggatatgttaacgtaacagtccagcaaggttcctcctctgtagctccggaagccattcagaacgcagtggtcaattacgcccaggggaaagtggaaggggaagaggggctggtggtgggcgcgagcctgtcggcattcgaagtcgccggagccatcgctcgcgaaattcccggcatctacatcaaactctgccaggtcgcgtgcgtcgcggctggctcgccggctccggctccgggcgatttcacttcggaatacgtcatgagcgcattcggccaggctaccatttccgttggtaacgttcgggtgactttcgtatgactctgcctgcgtacaattcggacatccaacaagctctgaaatggctccataaccaggcgcctggaatcaccggcctgatccagagaaaggcgcaatggtatgacagattcagccgccgattctgggccaactgggagcgcgacgttttccacttgaaaactgccaacccgttcggccttatggtttggtgcatcatcctcggcacgccttcgaaagggttcggcctttatccaaaaaacagttcttgggcattcggtcggctacgccagaacttcatctatagcggtacacaagttccgccaccggcagacgcatcgcctggcggcaacttctacggtggcggcaatgccgaaattctcaacttggacgaaatcaggaaagtgcttcagctaagatatgtagcgctgatttcgaacggctcgattgcatatatcaatcgcatgcttcgttacatattcaatgatgatgagccatgggacgaggcgaccggtctgtacttctatctcatggactcaaccggcgagaatggccctgtggagaacttggcagtatatcggaaagattgggaaggtatggtgttgttgtccagttcgcccagaacgaaccacgtgctgacatcgacccctgccagcgacgccgattggccaggagtcgatccggccgcgagcggaattccggtaacggtcgaaacggcgtccgctacggccccggacggctccgctacggtgtgcaagcttactaagccggccgggagtaccgcttacgtctccgcgccgatagatgggacgctggggtccggtagcactgtaacgttctcgttcttcgcgaaagccggctccacccgtttcattgcaattcagtcggctgccgatttccccagtcgagccgatgccgttttcgacctggattccgggaacgtaatcagcgatcagatgctggacagcagcgtggtaagcgcccgaatgattcgtctggaaaatggctggtggcgttgcgttctcacgaccaagaccgtcagctcttcgttccgcgctgcttacgtcgctccggcagaaaccaacttcagctggattgattcgaattccagcgcggcgattgacgtgcttatctggggcgctcagatcgaactgggtgatactccaactggatacttgaagactaccggggcgcccgtaaccatcaccgattatgttttgcagaacgcccagaccggaacagtcaagttcacacagccccttccgaccggagtagaagcgtattggactggagactggaaaggcgggactgcagcagaaccggccagattcgcagtcgggaatgggactcaggatacgtttactctgtcagaccccgcatacatcggcctacccaccagtggggcgttcaagctagaatacagggttggtccggcgcttaatctgtcgccgcaattgatcaacctcatgaatgaccgggcagttggtattatgccgacttgcgccggttgcgatgtcaaagtcattcaggagtaatgacgtgatcacacccgaactgatccccagtccgtttgccgctcagggcgataaagacccgattccacaaacctcctccactggcttcgcaaaccttcgcgacggctatacgccggactacgaaatcagcctggcgtcgaacaacccgcaggccaaagcggtcgagcggaaaattcaaaaccaactcttcttcatcgcgacccagaacgcacaggcgtggcagcgacaaatggcgccgccgtggtttcagggcatgcctggcggctacgaacagaatgcagaagtcgtgcgcgtcggaaatgacggcataatgcggcgttatcgttccatggtgaatgccaatgcgagcgaccctctcagcagcacgacttgggaagaacaacccgcatggtcggcgatgcgctccaacatcccgatgccggccggaggcccaggcctatcttctggcggagaagtcatcacgaccggccgcaacttcaacgacctgttaaatgggacgtgggagttcttctctgattcagtggttatcgcttctcagaatgcccccgtatatccggcttccgctggtgccgctgctggcatgttggaggcgaaatcttgggtgtccggagccaatacgttctgcgtccaacgctacactgatcgcgtcgggaacgtcgctgtgcgcgggcttaatgccggagcgtggaccaactggatgtatgcggtaaacgtcatggcccttcaacaaggtcgggtcacctatggagtcgcggccggatcggcgaacgcttacacgttgacgctagttccgcagctccaaggcggcctggtggatggtatgattcttcgggtcaagttcaacaccatgaacaccggcgcctccaccatcaacgtctccggactcggcgccaaagccatcgtcggcgcggccaacttccctctcaccggcggcgaacttggccaaggactcatcgctgagcttgtattcgacgcagcaggcgaccgctggagaatcctcgcaggcgcgccacgcatccaagttggcaacgccgatcaagattaccaggcccccagctggaaacaggtgaaggattacgtcgcgtcccaaaagctgactgaagtggactgggctgacgtcgtcaacaagccgaatgtcgccatccaggataccacaccgtggttcgccaacctggaattgtccgatgctcggcctttcatcgatttccacttcaacaacaatcgcgccaaagacttcgactatcggctgatatccgaagcggacggatcgctggctttctattcgcggcaggggtctgctgggcctacccaggacatcctgttcaaccgaaattccgtgactttcttccagccgcgactcgatgtggcgaaaaacctcgcgtacatcgcgaactctggccctctttggcagaacaccaccgccaatcagcccggttggaagttcaccttcgcacaaggcgtggacgcgaacaacaacgcggtgatcgcagtcaataccaccaatccggacggctcctatcgctcacagatcatgcgatgggactgggcgtccacgaacgtcatattcaacaatcgtccgctcttcgccggtcaatacactccttgggattctggaaactttgatccctccaccaagttgactgtgaatgccacgaaccaaatcgccggcccgaccgggattcggaatacgaacggcaacaccggcaacatgaacacatggggctccagttccacgacggcctcatacggaaacgctgctcttcaaatattcgggaaaggtggtggcgagcctgccgcgctttatttcgacaactcccagaccggatggtatctgggtatggacaaggacggacagctcaagcgggccggctggtcgctcggtaataacgcctacgtgattaccgacgaatccaacattcgtttccacgtgaattccatggctggcactcctgtttggggtggaaacgaattctggggaccgtggaacttcaatccgaacaccaagctgaccatcaaagccggcacccaggaaactagcagcactgcgatattcagcggaactctgccattcgctccaatcgcatcactgtccgactattctcaggcccctttgacgatttacaacgcgcccaccggtccgtccgcaaaaccggccgttatcgcgttcattcgtcctggcaactggggcgcgttcttcggcctcgataccgacaacaagttgaaatggggcggcggatcgctcggcaacagctccagggaaatcgccgattccagcaacatcatgaatctttgggcggccaacccgaccgcgccgtcctggaacggccaaaccgtttggcgatccggaaactttgatccggcgacgaaagtggatttgaacgccgcgaacgccaccaacggcaacatggtcttcaaccgcatttctggaactggtagcggcatagcttcgtccggtcgagttggtgccatcaacctgcagaatggggcgcatgcggggcaagcggccgcagtcactttcgagcggggcgacagtatcttcgtcaacttcggcttggataccgacaacgttctcaaagtaggtggcggaaccctgggggcaaacgcctatccggtcatccacgccgggaactacaataactacatcaaccaggcgctggttcaggtgggtcttggcggagtcggttcctatggcattttcgcggttctggacaatgccgctccaaccgcgaccgttcaaccgggagtggttgtggacggttccattctcatctactcgtcttgcgccgcaaactacaatagcggtcaaaggcctgccggaacttggcgctgcatgggatatgtagtcaaccgggatgccaacactcctgactccgcgacccttttccagcgagtgacgtgacatgaagtggacgcggatcagaaaccctcgttggctagatggaacaaatattcacgccatggtaactttcgaggggatcggggaagttcctttcactgccaatccgcacgacgtggaggcccacggaagggccattcacgctgcgatcctatcgggggcgcacggacctatcgccccggtcgatgcgaagcgggagcaggccttgcaggacgctatacgagcaagggaaaagcgggctatccttcgtgatacccgctggcccatagatcgttacgacgagcagaggcggctgggtatcgaaaccacggacggacctgggctgatagcagcccttgttcactggaggcagcagattcgcgattggaatagcggggatcggccgcgacttcccatggctctgaaaacgatgttcaagaatcaggagtattaatgaaaatcacgaaggatattctgatcaccggaaccgggtgcaccacggatcgggcgatcaagtggctggatgatgtccaggcggccatggataagttccatatcgagtcgccgcgagccattgcggcctacctagccaacataggtgtcgagtccggtggactggtgagtctggtggagaatctcaactacagcgcccaaggattggccaacacgtggccgcgccggtacgcagtagacccgcgagtccgcccgtatgtcccgaatgctctggcgaaccgcctggcccgcaacccggttgccatcgccaacaacgtgtacgcggatcgtatgggcaatggttgtgagcaggatggcgacggttggaagtatcgcgggcgcggcctgatccagctgaccgggaagtcgaactattcactgttcgccgaagactccggaatggacgttctggcgaagccggagcttctggaaactccggccggcgcgtcgatgtcttcggcctggttcttctggcgcaatcgctgcatccccatggcggaatccaacaacttctccatggtcgtgaaaaccatcaacggcgccgcgccgagcgatgcgaaccatggccagctccggatcaaccgttatatgaagaccatcgccgcgatcaatcaaggctcctgatattcgcccaaaagaaaaggccgcttattcagcggcctttttgctttccggctttgcctcttcaaccatcttgacttcaaccggcgcggcggactcttcctgagtgaccgaatccacatagttccctagtgaactcagaacgccgattaacagcgctcttaccaccttgtccttgactgtctcgcctatgatcttggtcagaacggatattaactcttcccggagtctggggctgattcttggccgaaagcgcttgcgatgctctttgcgtttcatgtttagtcctctgtctgcggtcttctcctcaccccgataatggcttggggatgcgctgtgttaatcggaaggttcgggcgctattataactcgtcgaaaatgctcgcgcttaactgtttaacgatacgcaccgcgatattaaatcgccttctttctggccaaggaactctggcggccgggtccggtctaaggcctaatttgtcgacattaaaacgagaaaacccggatcgcctgtagggcaatgcgtccgggtttatttctatctagtgtacgctaggatcagtgacttccgccccacccgtccagccagcaatcgaagacggcgtgcctcggcttgtccttggcgccatgggagaagtgcttgaaccggatgacctggcccttgagatactccctgtcattccagcggcgctgtttctcgtcgtgggtcaggctggaggccgacacgttgaaagtgactccaggccacagacgttcgttgcggcagactaacgcaccgaccattccggacggcgacaggttttctgcgtggctggagcgggccgtgtggccaagttcattgatgaaagcttcattgttgttgtgcatcaactcttccacgtcgatgatctcagcttcatcgtagtcgtatcgcttgactttcacacagtgcccttccttggcagtcgagcgaccgaacttgtacagcccatcagcgcgcttgcccatggaaccttcgaatcccagcattgtgtggcggcgctcgacttcgctgaactgttcgatggaagtcaccagttcctgctcgaccaggtgaatcctctcatagccgaggcagtgacgaaggaagttcacgcgctcggccgccctggctaggcgatcttcggtcggtgcgcgaggatcggtgaaatcatcgaacacatggaaagaccagtccggctcaccgctgtggcggcgaagatcgccggacgacttctggaaaactttcgggtcgctaatgtcgccgcagaccagctcgccgtccaggccgttgaacagtttatcgctgaggtattcgtagatcgattgattgttctgccgcttgagttgacgagtcagcgcctcaccttcgaatacgaagcagcgaaatccatcgatcttcggtgagaaatacatcggcagttggccttccagcagcttcgggtcaaaattcgatgcgagcatgggtttcatacagttctccagaaaagaagcccggcgaaccgggctaaatggcggtaagccggctcagatggtttcgttggcgcggttcagttcggccatgatcgacgcatagcgctcgtccgactccttgatgaacacgccgtcgtacatgacgcctttgcgatccttgatggtgtcgtaggccgcagcgtagcaggcgagcatggtagtgtcgtgctcttccgtcacatcgaacagagtcatgacggccaagaccaggctcttgatggctaatccatgatttccgcgtgccagcgcgccggccagatgtccgaggtgctgcaaatcgtcgccgtaagtgggatgaacttcgacagtctcgctgaagaccgatagatgatcgaacagattttcaccgagttgcgcggccatgatcgtggcaaccaccattacgtcgccgatgccgtctttcacctcgactggtttgttataaacccaggcttcgcaaacttctgcgaactcttcgaccaacttcaggaattgatccttggccgaagagcctttgatcaggttccggtcggaaccccatttaacaaccaggtcgtgaagttcgcgactcatgatttgttcgatattcattctttcgattccttttggatttgggatttgactgcgttgattatggacgccgtgctctggcgcgatccatccttggtggtgccgaagtagaaggccattaccgacttcagctcggcgaaccaatagccgatgatggtgccgatggcgaccgaggatgtcgggtccatcagagcctcgcggccgaatgtgaagattgcgatgatgatgagaatggagcctgtcagaagagcgaatgtaatagccgggcgaacgaaatcgttctgctgcgcggcaagccttctcgccgaatccctgtcggccgcctctgcggcgaactggctaagctcggcctggagctggttctgctcagactgaaggcgattttgttcggcttgaatcgcaagctcctggagacgaacgcgctcggcgctctggagttcggcgagacgcgctagagcttccggattcgcgtctagagcgctagcgaccgaggctgggtcggccttcgaccccagcgccgtcgcgacgatagagcccacggcggcgcctgcaggcccacccaggagcgatcccaaagccggggctgccgcgccgatcttactacctatgtccttccagtccatttcgaatcctcagaagaaaggcgccattacagcgcctttcttcggccggtgatttagaactcttcggcttcggtcgcatcgccaacgccaccggcgtcactgcgaggctgctcctgcttgctgtagtccaccttcacctcgccgccgacgaacgacttgtaaaggtcggccgcagctttgaagtgatccgggttcttcaccaggccttccagctcgaactggacgccggaccagctacccttgtcgttcgacatgccgacggtggtcatgcgtaccaggttggcgaaagttggcggggtgcgcaggccctgcggggtctgaacctttttctgtgacagcgcggtcatgagcttcttcgaggccttgatctgcgaagacgacagggagatcagagcctggccgaaatcgccggtgtccggatcgatgacgatgacgtaatgaccacgggtgtcggcgaagtagtcagacttcttgtcgctgaccgaaccgtcttcgttcggcgcgtacaggcgcccttcgacttccttcaccttggtcgggtctttcatcatttccttgaaatcttcgacgctgatggctcccttgaaaccgccctcggcctcgcgaccggcccagcggatgaactcacggcggtacgcggccggaatgaccagcaggccggtcttgccgtcgtaaatcttgccggtgacggtgttcaggaacatgccggccttcgcgccttcgatgtacttcgggtcatcttcatcgacctggggagacatcttctgcagaacctggatgaagggaatggcataggaatcggcatcggcgccttcgaagcctgcgccgtcatacgatcccaaatccatgaagtcgggaacttcggtagttgcgacggcgccgccaccggtggcaactgctacggccttggtttcttcggttgcttcggaagtttcggttttcttaccagccatgttaggctccttgtttgtcgaatttcagttatcgctaactgtgggtttataataacggaagttgcaactaagtaaagcaaattacatatcaagatttgctctttttcaccttcggtttcgtgatcttggcctctttgtattcgtgtacgccgatgaaatctggcagctcttcgcccttctccagatactcgcgaccgaacgcctggagggtctggtaatggacatcgcggttgatggtggcgtcatagccggcttcgatgatggcctcggccgccttcttcgcatcttccatttcgccgcgaccgaactcggccagaaccttggtcttgatgatgccgtcgttgtctgtgtcttccagccacttccagaacttcgatttgttctcttccttgacggaaatgatggccttcggctcgactttgaccgtgcgaccgtccgccagagtagtggtcttttgaccaagctcctccaacagctccggaatggtgttgcgcttgagggttttcagctcctcttccttttcggccagcgccttttgaagatcgaggatttcgacgtccagctgcgaagccttgtccaccaggttcagcagtcgatggccgatgtcggtggcttcgactgccatttcatccatgacgccaaaatagtcgatttcgcccggtgcgttctctttcaggtattccgggatttcaagctcttgctctttcatgtccgcctccaacttagtgatgttcccttacttgaactaagtattgagtagatattatgccgcatcttccttgatacggctactgatttacatattaaatttcgtcgcgagtgctaacgtcagcctcaaacactccatcaacgacataacttgccaggttgcgcttccactccaagctgacctggattttctcgtcgatggaatccagacagatcaggtcgaagtacaaaaccgagttgacggtgccgattcggtgatttcggtcttcggactgcatccgcaactcgttgtcttcgtcggtcgtgtagtaaatggccacgtctgcggcggtgagcgtgatcccgatccctgctgcggccgggttgcccaggaacacctggacgcgcttggcctggaaatcgtcgatcaatttttcccgctcggcctctttggtctcgccgtagtatgtgccaaacgaaattccttgggcctccagatacgccttgatctggtcgatttcctgaatgcgcatggcccagatgatgatggagcgctccgggtcttcctccagcagaccctccagaagatcagtaaacacggcgaatcgcgggttgtcttcgggcggcaggatcaccggctcgccatagacgttgatatagccggatgcaacttgcttgagcttcgaacgcgctgccgcagcatcgaaagatacgtccagcatgaagtcttcgttcttgagaacgaagtggtagtcttcttccacgcgctggtaaacttttcgttgctccggcgacatttcgaagtatatgcgcttgtacaccttgtccggcaggaatgggagtgcttccttcttcgtgacccggaaactgtgcggctcgatcagggaccgcagcctgtccaggttccggaataccgggcgcccacgctcgtctttttcgaccagttgcggcggcatggtttgcttcccttccagcttgcgcatgatagcgatcattcgaggatcgtcactgggaaccaaaacggaaaattcggccacgaacgcccgataggatttcgttccaagaattccatcgcgcaagaattggaactgcatgaacaaatcggtaggcgcccgcgttagaggagttccggaaaggatgcgacgggccacggccttctcacccagctttacgatctttttcgcacgcttggcttgcgggtttttgatcctcgtggactcgtcaacaattgcgcaaaccttgaaagtttcaaggaatcgcaagacttcatcatagccagcctggtgattgatggcgtcaacgttgatggcgaagacgcgaagaactttttcatctgcgaacgtctcggcatacagacgatccaagcgcgccctggcctttttggaagtcggtcggccgcgccaatccacgctcaaagtcttgatcgcgacgtgggtgggaatctcgcgcagaatccagttggtgtggacgcctttgggggcgacgatgagcagcgcgtccacgcgcccctgtaggaagaggcgaacggcatcggccaaagtcgtccaagtcttcccggtgccctgctccatcaggtatgcgaaattccgtttgttcagggacgcggccagggcattgaactggtgctgcatggcctcggtcttcatgcccttgacgggatatgttttggctttcatttgttctccaaatcggcgaggaactgaacaatgttatccagtccttctgcatagctcgcaacttccaccaagtcgcggctgttaagctcgaacaaatcgagcatgggattcagcagcagccaatcggtcccgatcttggccaggacgaagccccggccgccccagccgatccgttcccgaaggaaagggatttgcccaggctcgaaacatctggccattgggcaggtggaggcgcgtttcggccactcctccaacgccttgaactcgacccagaactggacacctcgacgattcaggcaaatcgaatcggacataccagaccgccgcgtctccagaaagtcgatcaggattcggccgagtgagcgttgcttaaacgcattcgccgctttcgtttcgcgatcattcatcgccttcgccctctttggaaactttctctgcttgcgctgccagctttgctttttcgcgttcggtcaaaatcctcttgacggccttcacgatgaacatatcgattccgctgagcttccagcctttgatgaggaaccaagagcctgtcggcgttccttcggcaatctgctttccgtattgcagatatttttcaggcctaattctgaaacgtatcggctgatcaaccgagtcgtcaacacacatgatgtcgaggaactgcgactggcccttgtacaccgggtttttcccttgatctgccctcttcttctggcgaatcggttcgttctcatcagacagaacttttttcaccatcttgacaatgaccaggccatcgtctccatcgcggatatcccgaatgttctggatggggtttccggaagttactccaaccaactccggattgtcataagcatgaccccagagcgtgtgagcttcgttcaaatctgcgaattgaacttcagaattcgacagactcgcggcgactttctcccaatcctgaagcgtcttcaggtgggttccggccagctctttatattgagctttcagctccctaagatcggcctttaactccttcagatcggccttcaacagtttttccagttctttgtcttggctgattttcgccgaaagaatctgggcttccagcgctgctacatcagcagccttgtcctcaacatcctgtgccgatatcgggcaattggccagggcgatcctcgcggccttgacgtcgtcacgaaggcgcaggaacttctctgccttcgccgggccgaagcctttggcgttcatgatgccgccgatcaggcgtccgtccgccactacccagttaagttcggaatgctccgggtccagggccgtatattctacgccttccttggccaattcgcgaaggattgacacagtttgctggtcgtctttcgccgcccgaagacacgcggccgcgtattccaggcgatgataccgcttcatgtagcaggtccagtacgtcaccacggcgtagctgaccgagtgggagcggttgaatccccaggcgccgaatgtcaccatttcctgccacacacggtgagcatcgtccggggcgacgcctatggtcttggcaccctcgatgaacaattcccggcgcttgttgaagaactcttcaccctttcgcgcagacatggctttccggattgccgatgtctgctcccagtcgaactgtccgatgtccttgacgatggacatgatctgttcctgatataggaagacgccgtacgtccctgacagatattgctcgacctgcggaatggtataggtcacaggctcgcggccggccacgcgctcgatatacttggtggccataccagaagacaacggacccggacgggctagcgccgtgatgtggtcgatgttttcgaacgcggtgatattgatcgcgtttgcgaccgaacgaactgcctgcccttcgaactggaaaatgccggacattttgtcttcgttgagaacatccaggaccgccttgtcgttcaaaggtaagtcgtacaactcctgcgcagtcacacagttcgcgtcctggatgacgcccagagttcgaaggccgagcgcatcgatcttgaggagattcaaatattccgaatccggcttatcgagctgcgcgacgccttcagaagttaccgtacagaagtcgataacttcatcgttgcagaccaggatgcctgccgcgtgtacgccagagtgggatgggtgaatttcgaggtcgcccatgcaggcggacgcgatctcatacttttcgcggaagtcgcggccgggctgagttttttcgaaagtgtcctccaatccttttccatatcgttcgtccgccgacgtatattcaatgatcgagtttttgatgttgtcggtatcgtggaaggggatgccgaagcgctttccgacgtgagcgataaccgatgcggccttgagcgtgttgatgttgcctaacttcaccacgttccaagtgccatacttctgctggagatattcgaacactagatagcgatgggtatcggcgaagtcgatatctatatcgggaagatcggaccgggaaatgtcgataaagcgctggaagagaaggcgatgagggagcgggtcaacctcggtaatgccaaggagatagcagaccaaagagccggccgaagagccgcgagctgggccgaccagcatatgcttcttggcgaacgcgaccagatctgccacgaccaggaagtagctgtcgaaatctttcagctgaatctgcttgatctcttcttggaatcgatcctcatactcctgggtccattccttgatgtggccgcgactgagacggtaggcttgcccctcgcgagccagcgcgacgatatccccatccaggtggatcataggcgccttcgccagtttcacatccgccaattgttcgactaccgcacgagtattggcggcggcggcatcgaactcttcgcgagtcatgatgtggcgtaaacggctccacaactcctcttcggtggcgatgtggcgaaggccgaccgattcccgcaccttccaggccgacgcgaaatcagcatggtcgatggacggcatgtcgttgtaagaggtaattaccaccggctttccgaatgccctggccgtctccatagcgccgtgcgcggcgaccatcgacgcgggattgatgtcaatgtagtcgattccgtccagatccagatgggcataggcctcgccagcgaatttgatgacgccgtcagcttcctggaattcttgcggagtcaatccttgattctggaccgacttggaagtcaagcggtagaacttcttggtgtccttggcgagcacccaggctttgagcttcagctctttctcgccatcgtcggcgcatttgatcgggatttccatgccgaatccgcgaggcagttctgccttggtagcggcttgttcccaacggacgtggccccatgttccatcatcgacgatggcgacgaatggggattcgatctctttggcgcgctcgatgatctccgggaatcgaccatatgcggcgccgtaggagtaaccagagcgaacgcggagctgagggaaagacatcatgcggcctccattgcttgatacgcccgatacactcccatgcgcttgcagacttcgtggagcagccgcacgtcgtcgagcgcccggtgtttctgtacatatgggccgcagtagtgctcataaagatgttgcagccgcatgcggtggccgaacaacggcgccgactcttccacagtacagatatcgagcgatgggaaattgacttcgtccaggccgaacttgccgcgagccagatcgcaggtcagcatgaacttatcgaatggcaggttgtgggcaatattcgcgtcggctctggaaaagaagtcgcgaactttctggcgctgatcgaggaaagatgggtgcttgatcaggtcttcgttcttcaacccggtgatcttggtgatgatttcctcgataacgattccaggattgcagatgaactctacttcatccaaaatcttttcgccatcagttatcacgccggcgaattcgatgattctcggctgctttctcagactcaccctttggtggaacgggagtcctgtggtctcagtatcccatacagcgaatatcatgtttgttccctcttatgtcgaaaggccggctgctttcgcgaccggcctgaggagtataccgcgacggctgaagatttacgccttctgtccgtctttcggcgtgatgcggccggagcgcatggtggcgtgaacaaacgccgaatagttgatcgagtccaaggccgaatcggcatccttgaacccgctattcgccaggcgagtgagtttgcccaccatatgcatcacgaacagggcgagccgatggtcatctgcggtcttcgccaccaggccgttcgggaagaggatttccatgatctttccgtacatcaggtcattgcgaccataggtgctctggcgggcgcggaagacttctgctgctgcgtacagattgttgaggacatcttccgcgaaatcatcgggatgagcgtcatcttcgccaggccagacggattccatggcgaacggcgcggcgtcttcggtcgggtcttcggactgagccgtttcagcgagcggagacggggctttcgcaaacgcctcgtcgagggtaggggcggagttcggggcggccgggaacggctcgcctgccatgtcgtttggcgcgctatcggggtcgctatcggccgcgacggcgaagaacggcgcatcgcaaccttccaggttcaggatgtaggagtcgatccccaggctattgtaggcatcgatgatgtcctggcgatcatcgaacgccgcgacgatcttggtgacgccttcgattttcttcaggatgtcgagcgcgactgcccgcttgaactgaggtgccggctcggtgttaccatacggccgcatgatgagttcatactcgcgatgttcggcgatgccgagttcgcggtggagcttggccctggtctggaaaaagtggttgtcggttcggccggtgacgaagaaaatcatgaggtcggcgtcgatggcattcctgatgcgacctacagcgtgcgggttgagagtgtccttgtcgagacgagaatgatactcgtcccattgccgttccaaggcgaagctcttgcggtggctatcgtcgaatacgcagccgtccaggtcgaagatgatgatgccattctttggtttgcgttccatattcagatttccttactggttgctttctgggtgacggttttatcgatgaacgtcccatcagaagtgaggcggaaaacttcgccattctggatgaaatcgaacgattgcacgttcatcgtgatgcgaatggattcgctgccgttggtcacttcgacttgtgcgatgtcgccaactttctcgacaatgatcttcatgttacatggacttcccattgacggccacagggttggcctcttgtttttccgatccccagaaatcgcggcgcagttcttcctgctcggccgagcgatccatccaggggcgatagaacttgcactggtagataggttccaacggaacatcaatcacaggaatctgacctggcttcgtctccagagcggccatgaaccggtcataggatttctgctggatttcctcttcattcatcaccttcgacccatagcgcgggaaggcgcaggagccggtggcgacgcagtgcggctggagcaggctgtcgaacataggatagacttccagaaccagccggcgcatttcgcggaatacttcctgatattcaccctgggtccgaacgcacaggcgaaccttcgccatgtcgctgagagtccgcagattgaacttggccgcgatcttcgtttccatgttggaaggaatgattgcgcgagcgtcctggagcgacgcgccggcctccagcagcttctggtaacttgtctgcgcgtctgcgatggcgtcatgccacaggcggttcagctcttcgcggacgtggtaggtcgggtcatgctcgccattgaccgtagccggttcgtcgaattcccagcggaatgcttccggctgaacgacggcgctgatttccagagcgcgactggtttcctgctggtaagccccggtgcgagtccgaacgagttgatgggtgaaattcttgctgacgccctcgatctggaaaatgaagtccacgaactcgaacggcgagcggatggtgtccagcatgtacttccagtggtcgagcttttcggcctcggtcatggtcgccgggtcttggccgcgcatgcgggttgacttcgtgcccaggagcaattcccaggcgttctgggtgtaactgatcagagaaatcttcatcagaaatcttccggaattggagtgaagttgaatttttcggtgagcgccagcgccaggccttgggcttgctccttacgaagtccatactgctctatctcttccttgagcagttcgcaggcctccagacgagactcatactcttcagcctcatggacggatgagaagacggctccatcagaggttcggtacacaagttcgatcgccatggtgacctcagtagcagcggatgatttcggcgcggatgtcgcgacggtcgaggtagtgctcacgaatcttgtcgcgggcacgctcggcctcttcgcggctgccgaacgacaggttgaacgacgtgaaaggcttatcgtccagttcagcgccggtctgatacaggatgcctaccagaacgaaagacggcgcggtcttcggctgctggtcggcttgcatttcgaggaaggacataggaacctcttcagaatgatctggtgcgtaaattaatagcgctcctgctgagcagctacggtttccggctcatagatgagcatgtcaacgatttccggacactggcctttcacccagtcgatggccgcgaccagtgcggtggaagcggagaaagaaaaagtgcggtaagactcatggatgtacggcgaccccatggaatcgcgctcggtcgtgcgcgaaatgactgctttgatattaacgatccggcccatcttcggcctccactttagcgattatatcggacaggcttaacttctcgccattcaggaaataactggcgcgaaacttcctgtcgccctctggcccgacgattcgggccgttatggtgagactcccgccgccaagggcatcggtgtcccggaagaaagtcagcagcgcccgcttgagcgctgcttcgcgaggatcgacggccattaacctaccacgttccagccgtgctgagcgcaccacacggcaccggtccctgcaggaagactattcagaaggaacacaggagtcaggcggccgtcctcggtcatatggatgaagtagcgggcgccttcaccgagccattcggccttggcgatagcgcgttcgagattggccttggtggcgtaggttttggtgtggttcttgtcggtggagaaggttacttcgcgggccatttgtcgattccttttggttgaagggtttcgcgtttcgatgagggaatattacgcccacctgatccagaagtaaagcacttttgtaaattacttcacgaacatcttcttggccttctgataagacgaagaagtcatcaggcgctcgatgacgtccatgtccgaaaccagatcatccagaaggacattgcgccaggtagcgaaccggccgagcgagaagatgccagcctcatgggtgagattccagatcatggattcgcgctcgtcgcgaccgagcggaatgattttgcctttggtctggatggtcggctcgccatcttcgatgagctgtttccttctgatgccgaaggccgcgcagacttcatccagatcccaggccggattccattcgatctttttgatctcaccatctgcattctccacgacaccattcgcgatggattccacgatcaaggtatcgccggtgatggacgcacgaaatgttccgaaatcgggactggggaaatacacggtctggaagacgtcacaagggatggaaagcttgtatcgactcacgatgatggaagtgcctttaccgaaggacgggtcgattcccaggtccagtcctgccgcagccaggttggcgcggaatggcgcggtgctgatgacattcacatggtcatcttgccggcgaatatactggaagaaagaggcatcgaaaggacggctccaggtgatacggttcgcgagcttagccaccagctgctcatagtagtcggccggtgcgatccaacgcttttcagtcgccagattccagatggaccggtccgacaggcctcctgttactttccgggagtacaggttgcagtagtcgatgcgcggctgggaaatcagctcgtcatccatgtagatggccttgtgtacagtgacttcgcggaacgggatgccggtgagttggccaattactggagagcggaatcgcaagagtgcgttgtgacgctccttgttctccggcgttgccgcgtcgatgatttgagcttgaggaaagcgatgcgcggcgatcagtccggctagcccggcgcctacgatgatgactttctgatcaggaatcatgatatgttccttatgagtgtacaaaacttgagaggataaaaaagggacccattttcatgagtcccttgaagagctagacgattcaggctcagaggagcggcggcttactcctcctcaccttcggaaccatcggcgccctgatcttcaccgtcgtgtccctggccttcgtcatcggccttctcgtcatcgccctggccagcttcgtcttccttcgaagcgatggcaaccagatcgacccagcccatgatttccagcttgctcagatagctgcggacagaggtgccatagagcagatgggccaccttctcgccgaaggcttcgatttcgaccggctcaccaacggtgcagtgctcgttgatgtaagcaaacaccttgccgcgagtcgagaaggcctgcggggttccatggccgtcgccggtcgggatgaagtgagtggcgcgggggcgacgcgagccgttggacttcaggtcttcacgacgggcttcggccttcgcacggcgctcttcctgctcttccttgcggcgctgcttctcggcttcgcgctcggccttcttctgctcggccaggcgcttgcgctcttcttcacgagcgactttctgagcttcctgggcagccttcttctcttcggcctttttggctcgctcggcttccttctcggccttcttctgctcgcgctcggcttccttggccttcgccttctcggcctgctcggcttccttcgccttggccttttcagcacgctcggcctccttggcggcggccttttccttcgccttctcggcgcgctcggcttctttcttctcgcgctcggctttgcgcttctcttcgcgctcggctttcttctgctcggcttccttggccttggcttcggccttctcggcgcgctcgcgctctttacgttggcgctcagcggccttctcggccttgcgcagggcagcggcttgttccttggtcagctcttcgccttgggtctgttcgttctggtccttctgttccatgttcttactccgggaatgtttaaagggatggcttattggcctgtgaggggattatctctaaactaattgaagaagggaatacccttagcctgaactttcctaaatattttctttcgggaaagtccaaactctagggaacttatttatgttcgagaagttcctagcttttacgcaagaacagtaagtattcgattgcgcgagttatcccagtatacatcaactgactataagggatggacggcaagttttcttctaacatggcaacccgtttccattctgaaccctgcgacttgtggaacgtcatcgcccagccgaagtcgaatccgccaatagccttctgcgcctccagccgcacgtcttcctcggccgaaaagctcaaaggattgaacttcacccagcgctcatagttcgtgccgataatgcgaactttggcgaacaacatttcgtccggctcgtcatcatcctcttggccttcggggaccggcttgagttcgagcaggatggcttgctcgccgttcataatgccgtattcatgctggttcccagtacacaccagcttctcgccgatttccggttgtacacccttgtagccgaggatgcggcgcgccctggcgttcaaacggcggcgagtattgttgtaggcgcaaaggatcacgccatcatcgtccaagaacgtccgcatttcgtcgtccgacatgtcgaatccggcccgtaccagaatgtcgtcatactcgcggcagggtaggcgcttgccctggcggacgaacatcgacgctcgaacgatattgccggcgttgcgctcgatttcggtcatgatggtgtcacagctgttctcatggaaaatctggacgccgcgcacaggaggaacttggccaaagtcaccaatctccagaaccggaattcggtgcgacagcaagcgctcttcatcccactcgccgatcatggacgactcgtcgagcacgaccaacttcggcttctcgtcgagcgagtctttgttggcaaacatgatttcgccgtcttcatcttcgccaatcggccgatagatgaagctgtggagggtccgggcattggtgcaacccttctcgcgaagccgcgctgctgctttcccggttggcgcgacgaagaccgtccagtccatcgagcagcaaagttcggcgatgatcttcgcgatggaagtcttaccagttccggcgaaaccagcgagtcgatagacctggcggcggtgcgctcgatcacaccaaccgcgataccagtccacaacggaattgatcgcgtcgatctgctgactgtttggtcgaaagccgaatcgctcttcgatctgatcgacggtgaagttagatgctgacatatttgcgttctccaacgctaggtttaattgaatcgaggctcagtttaagcacgccgtccacagaccagccagtatcacgacgatacttgcggccttgcggatcgacatagaagttcttcgtgcgccgcagcagaacataatgccaagcagctccaagcgcgtggacccttcctttatacgggaaagccttcgcctgctctgcggcctctttggccccagggagccagcggacggtcgaaaggaccaggaccgcacccttaatagcctgggaagcggcgcggccgtcctgtgggctatagcgatgtctatcgaagtctacccagtggtggttgccgcgccggagcttgaccgttcgggatcgcccctcgaacaccactgtgccttcgtgagtaaaaatatgttccgccatcgaatgttcctttataacgtacagttatgctttacctctgcgcaggaagagtatactatcagctgactcgccaaagcgagcgaatttaatccaactttacttcggcaggaaagtggccgatactagcgccgccgcctgtactgcctccaaaacagaggatacattaaatgcaagaatgcaagatttcccgcgaccaactcccggtcggtaatccgaatcccaatgtcgacaagacccgcgacccgaacctgaagcccggcttccttcgccgaagccgcgagctggacccggcgctggccgttcgcattcgtcgcgagctgatccacgccgaagcatccgacttggccaaggccggatgggtcaattcacagtccagcctttatggatcgaaagtcttcccgcgccattccgtcgttcgcgtgaccggagttccggaagatggagctttcatcggcatgctgatcggcttcatcgagcatcgcgagcatggcgaatgggcggtcacggaagccggaacgaaagaaggcggcgccgtcatcatcccggtcgatcacatcatgcgagcgtcattcgccgaagccgaagagttcgccgaaaagtgggagcggaacttgggatggcgcctcctgcgccagctccgcgagtgcggcgccctggccgggactgaagacgagttcctgcggcggatcatcaatcgatacgttcgtgatcgcacgatcctcgaccaccacaaagtcggcgctgacaaaatctacactgatgcagtgctcaaaagcatcggcgaaacatggccgaagattccttcggggaaattcgtcggacacagagtcgcgcagctcctgatcggccacaagctaggtcgagcggggaccatcctgaatgacctggtggacttcctggagaagttcgcggccgggcgcgataaagttctcaacatcgccatctgtaattgaggtgaagggatgaacaataaaccgacgctgaatcaccaccatcaaactgcattgttgtatctgtataacaatccaaatcagccggccttcacaggtcccaacaatcaggcgctgaatgaacttcggcagatgggatatgtaaaggcgaaaaagtttgaaaactgggcaggcacgggaagttgtaagtttgaatggtatctcaccaaagcagggatagagcgcgtggaagttgggatactgggaaaatgcaccacttgcaatggtagcggccagactttgcttcgggggaagtgtactgtttgcaatggccgcggccaggggtggatcagcgaatggtcgcagaagccaattgaagataatcctcaaattgtccctaagttcgaaaagaccgatgcgaataggcttgcagacgccattgaagaaatcggccggctggaaaaggcactggccgaatccgaaaagcgcgggagcgagctggccgcgagctattgtgacggcgtagtcggcgatgaatacggccatccttattgtcgttataaagtggaacgcgacgccgccttggccgaagtcgagcgcctgcgagaatcaaaaggcgatccctctggcagcttcgaccgttgtatgaagatgatgtacgagcgcgacgagaatgcaaaacgactcgacgccgccttggccagggtcgcggagctggaagggaagttgacggactgggtgcgcgaagggttccggctcaacgaggcgctagcggtcgccaaggctcaacccagcgtgccggaggggtggaagctcgtaccgatggacccgacatcgcagatgacctctgtcggtcagtccctgcgttatgacgcggtaaacagcatcggcgagatttaccggcaaatgctcgccgtagctccctcacccatcaatccggccgcgcatcctcagccgtgccagcaaccacaggcccatcctgcccgctgcgggtgcgagcggtaagtgccaagtaaggagtttatgtaatggaacagcagaaaccttcggaagtagatggagccatcgccatgaccgatctcgacattcgcattcttcgaaaggcgaagccagaagcgcaggacgagtgcgccgtgtccatgttcgcagcagcgatccgccagaaactgcagcgctcccgcgataaaggtcgaggcggctggatcgactgcgacgaagatattctgatcaacggattcgccgaacatgcgctgaagggtaatgagaacaacctcctggacctggcgacgttcctgatgttcatgtgggtgcgcggcatcgacgatgcgaagattcccccggcgctcgaaaaggcgagacagcacaagatcatggaagcctggagtcgaatccatgaagatggcctaaactccgccagaaaggcgagtgctgcgcgacagttcgtggaagtgcctcgtcgcaaagggcgcccggagcgacttgcatgaagcctcacgaaataagactggcccaggccgaagagttcctgcgcgaactcggccgagggattccggacgacgaacgggtgatggtcggctacgctgaagaagccacagtccagaccgacgagaacggccgcaagctcaacgccggctggtggcctgtgccctggaaggaagggaaatacatcaactcccgatccaacgcctacgcctgtatatcgtcgtccatcaagacgcccaacccgaagaccggccagatgcggtactggcgcggcgaagcctctttcggccacggcctggcgttgatggtcgatgacatcggctcaggcaaagggtccaagggcgacttcgaccgcgacgagttccgagaacgactggagccgaccgcgattgtggagacttcgccgaacaactaccagttctggtatttcttcaaagagccgatgtcccacatgctccagttcaaggcgctgctctattcgttcgtggaccaggtgctaaagaaaggcggcgacaacacagtcaaggacgtcagccgttacggccggatgcccttcggcttcaacaacaagcgcgggaaagacggcaagttcaaatatgccgacaaaaacggcaagcccgaactcgtgcgtctgtacagcgccgactattccaagcgctactcgccggaagagatcgcccaggcctttggcgtccgcatcatcatgccacagatgaagaaggtggagataaaccgcgacgattgggtgtatgaccaagtatggctgaagtatgccgagcacatctgcacgaaatacaagatgggcgaagcagcaggcggccaggtccaacagaacatgtccggcaaataccgcatccgctgcccgtggggagacgagcacacaaatggcgatccattcggcgcctactttcgcggaccgatccctggagccgagcacgaatatgtgttcggctgcggccacgatacttgccgcaaagagcatcgacggacgtgggcggccttcactgatgaagtagtccttccctatatcgtagaacaattggaaagaatcaaccgccgtcatatcggtgaggagtagacaatatgcaaaacgatcctggaatcctgattaccgccatcggcttgctgttcctcggccttatcatcttcttcgaaggcctaaagggatggaaaatacaagtcgcaaacttcctcgcgtcgcttctgtgcttcttcttcggcctttctgctttgacgttctggttcgttgttgcgtttgacgtattttaatcgacgaacggtacagaaattttcggatggggacggaacttattagctatgccggtttaggtaggagataatagccgtccctttcgcctcaatgtgtagaggcaatgttgaatccgatcatgtaaagcagaaggcggcaaacctaacatgattatcgacgaagataatatttttgatgatggcgaatcagggtccagtgagtttgatctcacgcagatagaagatgctggaatggaccctttgatgaccgccgcgagcaaggcggccgatgatgcgattgcgaggaatgagacgtaccgagcacaaaaggcggcaaagtatgccgaggcgtatgcggaaccagacttgaggaagcgagcgcggttgttgatgctcgaccaggcgttcgatcttccggtcagccgggtggtgaaagggccgttcgatgacttcatcactaaatacagctcgacgtcagacagcaactacctcgcggtctatgatacgttgttctgtaagggcgacggaaccgtcccacacccgcacttcgacgagtttcgcggccggctggtggaccatcgcggcgtggcgttcaacaacaagaccctcgatccgattgacctgatgggcgccctcgcggctgcggccttggacgatccctcgattaagaagacgattgagacttgctgcgtttgggcgcgtcgatatcgccgcaactcgctgatcgagacgtttgagaagaagataccggattgggacggcgaagagcgaattagcacgttgctgatcgatcttttcaagccgttcgacaccgaattgaaccggatggtaagcaggtatttctggctgagcctgtactgccgcatcaactatccgggaatttcggcgccgatttctctggcgttgatcggtgggcaggatgcggggaaatcctatttcggcctgctgatctgcaaagaactgtctggcggtcgcgatctggctccagtccagctcgatctgagccgacacgaccagacgccgttcctgcgcaacatcaccggcaactcggttattgcgaacgtcggcgaaatgtccggcttcaaaaagggcgacatggaacgcatcaaagaattcctggtgcgatcttcggatacattcgatcagaagtttgagcctggcgaaacgatcaagcgacaatggatcaccatcatggacggcaacggatacgatggactccagcgggacgactccggcaaccgtcgattctatccgatgttcgtggcacaacttcccgacgaggatggaaagccgaactgggttaagccgggcgatggtaatgaaccgttcaaggtggacttcaccgacttcgggcgcaaattctggcaagcgatggctgaatgccgcgcatggatcgaagagcatggtgtcgatggatacctggatatggtgtcggaagcaaaccgcgaagtgcagaagttctctatttcggaaatggagaatgcgcgcggcgtggttcgtgatgatacaattgacatgtatctgatcaatgttctgatcagttgcgagttcgaagaggttaagccgggcaggaattcaaagaatcctggatggagggctgacaccgttgctattctgaaatggttcgatattctcgccaggaagaagccgatttctcgccaccttactccgcacctgaaggcgctgggattcgtcccgaataagaacggcctggctggttggtgcctgcccgtcgataaggttgcgcctggatggacgaatagtatgcaaaccacgctgccgccgttcaatgatgcgcttgtgtacttgctgaggaagggtgatccggatatcactgctgaagaggcaatggcaaagattcgggcagtccgggccgagcgagccaagattttgggcgaggatttctgatgtagtggtggagtgtacttggactaggccgccttcgggcggtcttttctttggtgcggcgtacattcgatttcggcgttgggcaggattggtagaaatgaatacagtaatttggacaagtttcgagcgcgaataatggaaagtcgatagattttccgtatcggtttagcgtatatggtggctggattttgcgtgaaatgttgagaaattgcgtgtttgaggtggtcttttcgtgggaaatagccgcaaattactgtatagcgattctgagaggtaatttgggaagcctactgccgcgtgggttagcggggccaatttcctaatttccggtttttcgagcatgggttaaaactattctacagcgaaaatcgattgcacaatcctaatagaaaaaatctatcacggacgttacctatctttaaaattaataaaattaatagtaatttggtaatttggtatactttagtatttgaaagcctcgcggcactaagcttgtacatatcccgtcaagtttccgattccagcccgctcgcggcagggtcgccggaaacttccggacttccaatccatgggtcgcggcaacaccacggcggactaagcggcaaggaccaaaactcgacgaacggaaccgggaatttgggcgcacgacaaaatagctcagctggacatatttctaacattcgatttaacactcaatccaaacactcaccaccatcgtctcccgccaaccgccgactcgatcctcacccaccagcggatcgcccgtataacatcctataacaccacctaacactcattcatcatcaaacccacccagacctacagcccacccacaagcagcccatagacgcgatccctggccccatagtacaatcgcgccatactcagtgtcgcggcagagcaccaggcccgttcaccactaaagccactgcgacgactccagaatcgaactcagggacgcagcaccaaatgaccaaatactacagccccgacgatctagtcacgccacaggaattcgcagacccgcatttcgcggcgatcaaccaaaagcgattcgacctgtacatcgacctgcgcgtccaaggttacagctcctggcgggtcttccgggccatctggggcgaggagcatatggacggtcccgcgcaggcccgcatcttcgcgatggagtccaacccgtactatcgcaagcagttcaaggccaagttgaacgcgaccaaaacgtccgatttgtggaatccaaagacggcgctccacgaactcctccaaatggttcgtgaccccaccgtcaaggactccagccgtctgtcggccatcaaggaattgaacgttctggctgaaatcacgttcgtggacgagtcgggcaagaccaggatcggtcgcggcctggccgacttctacgcatcagaagccgaggctcagaccgccaccgtcgctgctgcggccgaagccaatggctatgtgccggaaggcgaagagggagatttcccgtctccgacgccagaaccgaccgaggaagaccgcgccaaccccatttagacataaaataacatcgttctaggcccgaatcggaccgaactaaggcgacggtagcgggaagggacgaaaaacgattctagggcggttctaggaagtcgtagcctaaccctcagaaacgacaaaaccccggactctagttcagaatccggggctttcttttgggcgccttattcgccagcttcgatgatttcgaagttgtatttgacgccttcgtgctcgaaagtcattttgccagccgccttcagctgcatgcggaagcggatgtgtttcgaagaaggcaggccgaactcgatgaatgctgcgttggtggaccggaactcgccgcgcttgcctttgacagtcacagccacgccatggcgctgagtgcgtttcttggaaacttccgggtctttccaggagttggcgatggctgccgacaggtctttggactctttggctttctccggagcgttcttggcctcttcgcgcatcttccggatttcttccagcgcttcctcttcggtgatctcttcttcaggcttcagattctcttcctcggccttctcttctcccttcttcttggaagtgcgggttttgtagactttggccggggcttcctcttcctggaaggcttcttcctcggccggcagagcattcaggatggcgaggcagcgacgctcagcagtcttgcggtcagagaaacgcttgacagtcgcatcggcgttgtgggcgttgtagaaggcgaccagttctttcatttctgcgttctggatgtcgccgaaggttttgatggagttggtcattttgcgatcctctgttttggaagatttcgttcgggcttcggtttgtcgccccgttgaaagagattatgcctaggtcgatgctgcgtgtctacatttatttcatcagattgatcgcaaagccgacgaacggtcgtcggatgtgaaaacaccgcagaacaggctgcggtgtttggtgggcgagggcgatggtcaagcgaacggatcgcccagcatatcttcagacggggcacgttgcatatcgcccagcttgtctttgtcagttgccggactggacgggatcgcgccggaccgaagcgacagagattccgactgcctgctcacctgcggagccggaggagccggaggagccggaggagcttttggcgcagtaggggcaggcgggaccggcaggcctggaggagccatcggcgccctgggaggttccggaagatcgggaagactcggcgctatgccgccaaaggaccgctgcgactgttgcgccggattgtcgccgaacatttcggcggatcggttgtccttgatgacttgacctatggccgtcttgtcgccgcccggctctgccggatcgaagcccgtgaatggagtggtaacgcagcgcatgttcggatgggtaggcagatttttcaggactatggaatctgcccagacatacggattcttgtggttgccgggtccgtggctgatgatctcggcaggaatatggccgttcatggtaagccattccgccatcccttgccgagtcagcgggcttaccacgatctggccagtagactcttcggcgacggcgaacagatcaccgagcttgaacccgatgattgtgtagttggacctggactcgccgacgaaagccagagtttcgatgttgtggtggatgtcttgttcttcccagatgtacagcatggtgttactcctctttggcgaaattgttctttcgaaggtagtaggcgatcttcagtcgtggccagaacggcgtcagcgccacgttgtcgtgacggatgatcgcaaagttgtccgttccttccagccctgcgatgaagcagcgttcccaggcgctcccgctgtagcgatcatctggcttccagacgttcatgcctgatcttagttcgctcgactcccatttatgatcgatcttgacgttcctcatggcgccctcaataaggctgcttgttgtgttcgaccagagacataccggccggaactttgaagcggacgtattcgatcatcatcgccgttcgacgccgattcgtgccagactcgtcattaacgaagagttcgcactgatgcgggatgactcgcgtcaccaggtcttcgcctttcgaaccgtagaacttgatgtaggctgcgacgcctcgcgtcatgctcagatggatcgtttcgcagagtcgctgcgcggccgacgcgctggacagatcggtcggactgaccgtcacccagtaatggccactttgttctttatcggacataaactgccctccaatgagaaagcctctgcgactcggcagaggctggttgttagtcgcgcttcaacagaacgactttgtcatatgcgcgatatttaccgcgccagtcttcccagtagtcgccggccgggcaggtaagctccagggtgatttcgtcgcgccagcattcgacagaaagtacaatcgccttgttccttgctgcaccctctgcggcatctgctctgagcttaatcagaatttcgtcgccagttttcagctcatcaactcttacaactttggccatgacacactcctgtttgaagaggcgcggccggaaccaacccagccgcgccgatggattaacgtttgtgaaggatggaaactgcgtccacgtcgaggatgctgatggtacggcgacggcgcggattgctgcgttcatggatgcgaatcaggtcagcggatggagcttcgttcaccacccatacatcctccggcttctgcgtccggagcaggaccgtcacttctgtgttctgggcgaggccgttgcagatgaacgtgaacttggacgagggagttctgtacattttcgagattcctttttggacttcgggtccggctcctcagccggtgaagagattatgcctgatcatcgcagtcgagtaaagcacttgtgtaccaattctccagttaaatggaaccacagcgcggtatcgctgatcgctacgctcccacgccatggtccttcttgcttacagactgcgaaccacaagccgatttccattcttgccaggactcggccgaaggattcgagccgacgccggctggccaggatgtcgacattcacccgccgattgatttcgtatcggcgaccgttgatgacgaagaccaggcgcagggtgcgtccgtccagacattcccagtatttggtttcataccgaagccagtagcgcttgccagccgggcctaccatggtcatttaatcgatgctcctggccgcgccacgcggtccggtcggcggcgcaggatcgaaccgccccaggatgtagtcgggccggcgcgcttcctgaggacacacggcgagaaggcgccatcctgcgtccagggcgtactggagttcgtccgtgcagcagtcttccttgagcagcagacggttgacgctctggagattcggaccagggatggccgagctggtgtgcgagttccaaccttcgatgccgtccaccatctgtggttggttgatgtagccttcggacctgccagccaaccggctcgcggccagctccaggcgctccagcattggccgcaaagcggcttccgggtcaacatcgtcccagagaaggaccaagctgatgatggtgtacggatagtccttgtccagatcccaggccgaagcggtcagacggcccaggccgatttcattacacatcacgggaacgtcgttgctccatgtggacggctcccagttccgctcaccaggattcccgattgttacgccttccaggttcccaaggagaacgtggagcttgctgacgtattccgcctccagcgctttccgttcttcgtcggtctggttgtggcgatagaaggatggagggctgacttttgcatggtagagtttcataactgttcctcggttttggaagattcgaaagttagagaatggtgtcgcagtatttctcgaaaggactctggcgcttcttctcgcagatcgcgcaggtgatttccaggtcgggcagctcgctgtaagtcttgccgagatacagccagcgcttgcacagactgcggccgtccgccgcgaagaagtggactttgcgagcatttccgggctgcgcccagccgccttgatcgtttttgcgcttgctcatggcgatatctcttttggatctggaatccatgccgtccgttcgctcacccatactccatctacataaatcaggactgacagagcagtcgcaccaaacccgaagcctacatagaatgagccgggatcgatctccatggtggcgctattggtggcgctattgaaatcgacttcaaagtcgaacatcgaatggccaatcataccatcaccatgtcgatttcattgatgaagaaatggacatcgacaccatcggcgcggccggtgtaacgcagccgagtcgtcccatcaatgtgagcttcctcgacgccgatgacttccaagatggtgtcgttgcagtacagcttgacgaacatcttgatgccggagccaatcgccgcgaaggcaatctgcttgtacaggtcttgcttgatcatgctttacgctcctgtttgcggatgtactctgccctggcttcggcttcgaacttcgcccaaagcgcgttgtcgactgggccccatggaccggtctgagctccgtccaccggcgcgaacttgccaccggcgcgacgatacttggacagagttctcaggccgatgattttctcttcttgggagtcgagttggacgatcatttgacatacttcccgaagtagcaggtgtggaggatttccatacccttggagatagccttcagcttgataccgaaattcttgatcgcccagtccagatcgtggtgatagaactcgatgatgttgacgatttgaccggcgctgtagtggatgacgcgaatcttaccattccagcggaaatcttcgcggctgtttacggcctcgacttcgatggtgtcgtttctgccgatggtccatttggagctagtcatgtcgcaatcctctttttggagtgtttcgcgtttcgatgaggtaactatacctcagtcacctcatcgagtaaagcactttcgaacagattatctgaaatttctggaagacagatccatcggctgattcagtcagtggaaccgagactccatccgttgcgggcgaaggccgagcgaccagacagcttgcggcactggatggagctgccatcgtcgaaggtgtaggatacggcccagtccaggcgctcgcgacgtactgccgcagcagcgatatcttccagacgggctttgagaagttgttctgctttggtcatttcgagttcctctttggagcgcttcgggtttcgatgagatgactatacctcagtcatctcatcgagtaaagcacttctgaggaattatctgaagtttctggaggccagaaattgccgccagagccagtcaacgtgatcgttgagatagcgctcgccatcggacgacagagccaggcatccatcctttatgccgagtttggagccggaaatccattcgaactcgaactggagcgttcctgggcgagggatatgggacaggttgtacttttgcacggtcagtagtcctcgaaaggattcatgttggctatggccgcgactttctgcataccgaggcgatagaaatcggcttctttcctggctttggcaagctgctccatggcgtcgcacgccgtcttgtgctgggaattggcgttcttgatgctgccgtccaggctcttgtctaactcttcccgaagagccttctgcgatgctagctcggcctccaaatcctggattctgagttgaagctggcggttctgctcggcgaccttgtcttcgcgggctacgaagttctgcaggcggtcgacaagacgagtattttcgcgcaccagctgctgtttggcgactttggtccttcgcagttctgctcgcaatgcggacaactccagcgcatgcagatcggcgtccgattcttgcgactctgcggcctgcttattgcgcagatagtattgcccagccgcgaaggcgagcagtgctcggtctgtatccttaactgtcttggccatgaagtgggctcgatacagaggcgcgaacttgcaggcgtctgggtcccaggccagattatcggccacaggccagaatgcgcgaaagcttttcgcatcgacatgcgccttgaccgtctgcgatgcgcccgactcttcgcagatgatttccagagggacataaatggcgttcttgatgcttcggaaagaaatggtggacataacacaatcctcataagaagtcgcggccgggaccatcctggccgcgcatcgtaatcactcttcgccttcgtccgcgctcagccactcttcgaaggcgaaattcaccttcgactcgacccaatcctgcagctcatcggcgaactcgtcactgtcgatgtccatcggaacgcccagagtttcttcattccacaattcagcattcagctcgaactggaccatttgctcgccatcgacttccatcaggatgcggtctgcgacttcatagtcgtctacatcgaacagatggccgccagtcaggaggtgctggacgaaagcttcatcgagattggtgacttcgatctggacttgtttggtcattttccgtctccttacttagcggctttgaattgggctttgaggttggccagttcagctttcagatcgatcatcgcctgaccgcgcaggccttccatttcggcctcgctgatcgcgatcttggctgcgcggattttgtcgttgatttgatctttagtcattttcggcttccttttgtttgaagggttttgcgtttcaatgaggagattatgccgaaagtcagaatggaagtaaagcatcttgatgagaaaatttctgcccaccgacgaacggtcgtgctcgaccgtcgatggagggtgtgcataatcgaagtcgcacgacgcgaccggtgatgccccggcgaaccggggcggggtggttaggcggtgcgctcggcggcgcgttctgcgttacggtcgtgcgccatgcgcgcccatactgcggcccagcgcgctttatcggcagagttcggcttgtacacgtcgtcagggtgcggttccgggccgtaggcgttgcagctttcgtcgtattcgtaggtcatcatcttgccctcaaggggtcatggcccggcgaaccgggcgggtgattacttgcgatatttcttaataaggtcgtgtgccatggcgatggcatcagaataggtttctccgccggcctccatttccttcacagccttattgcgcagtgcgttcagcttgttgccattgatggtgcctttttcatccttggcagcttcgcaggagtcgcgcagagttttcagggcttggtaggtggcgttcatcgtcttgttctccgggtttcgcgtttcgatgaggagattatgccgatagtcagaatggaagtaaagtgtctgaatgaagaaatttctgaacaccgacgaacggttgtgctcgaccgtctgctgcggtgtcgatatactcggcctattgcgaacaatggactgattaa

SEQ ID NO: 19 - DNA, 66510 bp, Pbunavirus EPa21
  source 1..66510: mol_type = genomic DNA; note = EPa21
atgtacaaactcaatcctgcgctgcgagcggtctggcgaactcgcgcccgttacaaagtcatctatggaggccgggcgtcttcgaagtcgcacgacgctggcggtatagccgttttcctcgcggccaactacaggctcaagttcctctgtgctcgccagtttcagaaccgcatcagcgaatcggtctacacgttgatcaaggacaaaattgagaattcagagtacaacggcgagttcatcttcaccaagaactctatcaagcacaagaggaccgggtcagagttcctattctatgggatcgcccgtaacctgtcggaaatcaagtccaccgaaggcatcgacattctctggcttgaggaagctcactatttgacccaggagcaatgggaagtcatcgagccgaccatccggaaagagaactcagaaatctggatcatcttcaacccgaacgaagtgaccgacttcgtgtatcagaacttcgtggtcaagcccccgaaagattcctgcgtcaagatgatcaactggaacgaaaatccgttcctcagtgagacgatgcttaaagtcattcacgaagcctatgagcgcgaccgggagcaggccgagcacatttatggcgggattccgaagactggtggcgacaaatccgtcatcaacctcaagttcatcctcgcggccatcgacgcccacaagaaactcggctgggagccagccgggtcgaagcgcatcggcttcgacgttgcggacgacggcgaggatgcgaacgccacgactctcatgcacggcaacgtcatcatggaagtggacgaatgggacggcctggaagatgaactgctcaagtcgtccagtcgcgtatacaatctggcgaagataaaaggcgcctcggtcacttatgactccatcggcgtcggtgctcacgtcggttcgaagttcgccgagttgaacgatgccagccccgacttcaaacttatctatgatccattcaacgcgggcggcgctgtcgataagcctgatgatgtctacatgaagctgccgcacacgacgatcaagaacaaagaccacttcagcaacatcaaggcgcagaagtgggaagaagtcgcgacccgattcaggaagacttatgaagcggttgaacatggaaaggtttatccattcgacgaattgatttcgatcaactctgaaacgattcacccggacaaactaaatcaattgtgtattgaactttcgtcgccgcgcaaagacctggacatgaacggccgattcaaagtcgagtccaagaaggacatgcgcgagaaacgcaagatcaagtcgccgaacatcgctgactcggtgattatgtcggccattctgccgatccggaagcccaaaggcttcttcgatttctaaacacagaaaagcccggatcgctccgggcttcgggtcttactcggtatggttcctggcgctgagtgtcgatgcaacggcctcgccgactcccagggcttcctggccggccgcgagcgcttcggcttccgactcgacgatgaagtcatcaccttggccgtcgccgggcggaacctcgaccagcacggcttcgtcgccctcgaaacgcagatcataggtcttttcgacggacagaccgtaacgggcgttgagcgcatcccagagctgagcttcatagttgcgcaggtcttgcagagatttctggtggctgagcatcgccatatcgacggcccgttgcagggtttcgtccaggacgttgaatcgcatgcgaagagaacgaatccgctcgaccacttccgcatccaccacatgtctttcgatcatcacttttcacctttgctgaatgttacgttgtagccgttgtcggccagataggtcagggcgccttcgaaggaagttccgacaaggtgcttgagctgcattttgcgttgcgcggcgatccagaatgccgttccggagaactctgcgcggccttccgacaaaacctttccatcaggcccggcgatccgtacatggacggaagatagcttcagtgccatcagtggaccgtccctgtgaaggcacgcgccgccgcgcattgatcgcaagggcactccctctggatgcgcgccagatcgtttgcatccagggcgtagagttttccatctacggtatcgtgagccattgcgatgtccggatattcgttttcgtccaggccggatgccgcgcggatgttgttccagatgccggcatgttccgcgcgatggcgcgcggtcaactcatcttgctctttgttcgccctttctacgaatttctccaggacttcggtgaatttttcatcgatgactcgtgcagacttggcggagctgaggcgaatcgggtctttcttcatggtgattctcttttggctggtggttgttcgttgctcaggcctattcacagcctgggcagcatgatgaatatgaacacaaaggctgcaaacgccaatagcgttccggtaagcattttggactgactctgcatctcagcgtactgctcagtggacattccgtgctgcgccgcctcggccgcgaagcgggctttcgcctcgataacttccgggcgcagcgacaggacatattctaaggcctcttcccgcgctttttcggcctcgaccgacctagggtcgcgggccgagacttcgctgtgccctggcctcgcgggatgggcctgcagcgatggcggaagttcggcggccactactccatagtcggcgcaggcccaagctatcccgatgaggatcgcgaggatggattgaacgattcgcagcatcactttgtcgctaggaaagctcatgatcaatcctccaccgaccgaacgatttccatgttgcgcccggcattggttccggcagtgtaggcgcgccgaccgtcgctgtcgtccaggcgcatgagcttagtaacattggacttcttgtagccaggatcgccgaaatgttcgtgaaccgcagcttccttcaccaccaccagagacgttccggcagaagataccagctccatacgcttcctggtgatggattggaggcgatagctgatttcctgggtcgcggcgagcttgaattgcgcggcaaccttgacgttgaaccgttcgaatccttgagctttctgatactcccggcacagacgatcaacggcctcgaccagggaattgaacatgttcaccgccagctccacgtccgacttgtagcctttaaagcgaacggcatggccccagcgtttggtggtgctgccgtcgcgggcgctcctggacgccttggccgatgctcggtgattgttgacgccaccggcgaaatccatgatgcagtcgttgtacgtcgcaacggccaccgagaagaatttcatccaattcgggattgcggaatagtaacgagtagcgatttgctcgtcgaactcttcgcgaatctcgccggccgcttcgaagtcgtgaagatcatatttgtccttcagcttcttcacgcgctcggcagcgatggccgcttcgtgcggactggaagagtcggccgccatggcggtcagcttgcggatgcggtctttcgctttctcgatggcttccggggtgaattcgttctggtcggtcatgttacgttccttttgtctgaagggtttcgctttcgatggagctattctgccttcatccagaatggaagtaaagcattttcttccattatttcggaagagcctggaaataattccaagcccagtcgcctgcggccaggacgaagatgatgaccgcgaagaacgcgattgcagcgaccagttgcgcgcccggcttcagcttgggatggctgagcttgggctctacgggaacgcccggagtgctggcgctggaaccggcgtctcctgggccgtagccgattccacgttcacgcgcctggagcgacaccagggatttcagatactcggtctgcttttgcgactcttcgtagatgccggcgacggcgaaccagagcgcgaacactacggccgtgcatatgacccaggcgccggtcagcaggagggccagcggaccgatgaggaagacggaagcggccaggacgatggcgccgccccagatgatgaagccggccagaccattggtgatgtcgatacagaactttttcattttcagattccttcggttacgggatggaggggatttggaactctgcgccgccgagaacatcaatgacgacttcccagagcgtcggaacagaccactggtaacggtcgaagtcggtttcaggatcgacgcccagcgtcacataggaagtggcaggccatttatgaacactgcctttccgcatgagagtcgccacgcggccgtcaccgagcggattcgtcctgtgcggaacgtacgcagacatcgaatattgctgcccggcgtcgacaacaaatctttgcctctggcgcagacatacagagcccacaggattccagccgcgaccgccgcaagcctggcgagccgaagaatgctcataaccttcgtgagtcatttcgccgaggcaagccgagcgatcctcgtaatagttgatgttctccatcgatccaaccagcaccagagactcgaaatcgaatcgatgatcgtggatggccgagtgattgaagcaaagccgacgcggcagctccgggtgccaaacatggaggcgaccggccggaagttggacctgaatgaaccccaggccgtgcagagtgatcttgtccttcatcgggtcatggacggtgctcatggataatcctcagtagcagaaatgtattgtgagagttacgattgacaagccggtcgcccatagaagggcgaaccaggccatggctttgacggtcgtgtagatcatccgaagaattttccggcacagatcgggccaatgcccatttcgatggatgcgtggttggtcaactcgcgaccgcagcaggagcactgaccagtcttccgaccgtaggcgactgccgattccatcggcttttcgaacatcttcagaacgtcgtcgtgctcagtatcggtgcagtcgcgactcttgatgaatttgccattggtgatccggccgaggtagatgtcgcccaggacgtacaggctaccggcgttccggctgtgagcgccagcctctttcacaacaacgatgagcggctcctcgccttcgccagctaggcggattttcgggcgcttgataccagactctttcgccttctcaaacgctttctcgatgccggaaatgtccagagtcggcgcagcagcttcctgcgcggccactttctcgcgatacttggcgaggttttcgatggcgcgcttcgcagcagcgatctgattttctgtcaaggagccgtatttatacaacgactcctgaaggctctgagcgaagctgaaggaatttccagtccaccactcgatgatgtccgggtgcgcggcttcgaaggccttaattttgaggtcgcgctcttgcgcagcgctacagattttctcgatgcgcttttctgccgccttagcacggctcttggcgcgctgctccgggctggttttgtactctttgtatccgacgccgccgcaggcaaagcaggcgcgaccataagacgaagggccacggtacaggccggtgcctgcgcatttggtgcacttgtcgcgatacagcttcacttccttccgggagttcgggcgggcacccatggacacgtcttccagggtcttcggcgcttcgttgttgatctctacggtagcgaagtcatcacccaggtcttcgaagccggtgaacagattctctgctgcgttcatgtcgattctcctgtttggaaagttcgtttcgatgagttgactatacgccagaagtggaaaaacggtagcgatttctcactaccgttcgtcgggtcgaagacaatcaataaatgtcgctattgatcttgaacccatgctcagcgccgtcgttgtagtcgtactcaacataactgtcgcagtagtcgttcaaatgctgaatgatgccaagaacgtcgttcgcggccttgtgccttttcgcggcgatggtcttggcgatgctgtcgccgacttccaggatttcggccgtccggcgatggatcagcaggcgactccaaagatagagccggacgcgacgaataatgtcgcgatggcgctccagtcgtccgtgcaactcttcaatttcgtgctcgcgagattttaatactcgtcgaagctgttgaacttccaactccaaatcggccttagtagccatgttcacctcaaaaaggaaaatcgtctgggactccaggaagttcgacgattattgttgagcctgatcggtctagaatgcatccgaccgagccagccctgtgtggatagggtctacacgaactataacaggtgacttccctgactattcgccaggtcgatcctccacaccatctgcaaattggcgggcgcttcgacttcagttttcgttcgtccaggacggcgcgtctgtcgcaggaaaggcagcgtgccttaaccgacgtaaccatgggtatagtcgatcattcggatgagctcatcatcctctgattctctcgacttcagaccgcccaaagagtccgactggccgtcgcatttcgcatcgatatccatcgaagacaggaatcctgccgatactgcgatgatatcaactttgtcgccggccttcttgaagccttcgcactcagcatcgagggccacaattgcactcgcggccatgttcacatgactgatgaggtcggggaagatcacaggaacttcacgcgacatgccacggaccgtcagcttcaggactacatacttcatactcactatcccttttgtatgtgaggaaagaacttgctgttttccggatggtgaaaacgctcggtcgcaggcggtctttcttccggacattgaatcgtcgaaggcgggaaaaccgcgccggcgataatcgccgcgaggagtgcagcggatgtcgacatccagagggcggtttccaggctcacccgaacttccggacggcgcggcttcattcgctccaccctcttcccggttcataggatggtagactgccgccgcgaacccagttgtcccacatatggttcagaccagtcggtggctggggtggcggactgtagaatccgggagtctcagtgctgctcaggaaataaggcgtgcaaacggcctggacgaccaattggtgccgctcccacatcttatcaatcgctcttagcatgacgtcttcgcactgagccttactgtcgaaccgtctgctagtatggtccggcatctggacgcagccgtctccagtacaaaggaaagcagtagcaatccatacggtgatactcgccatttcgtcaccctctttagttgatgagcagagtctattccatctgctcgccaggagtaaagcgcttttcgtcgggataaatgccgatgatgtctgcgtcgagcatccaaatctccacggacggatcgtcgctgctgatgtggtacaggttgtacagctcccgtccgccgacagcgcgctcgcctcgcggctcaaccgccagaaccttgccgtgcccttctccgtgctcgtccaggtatatgacgtgatcgccgacttcatagctttctttcgtgacgaggcgtgaacgcgagctgttctgcgattccaccacccaggaatccagcacgccgcctttcatgtcgcgaaacaatcttgccgatttgtcgcaatcgaatacgcccagaacttctccgtctttcaacacgatatgtacgattggcaaaagagtattcatgtttaatctccattggttgataattagagtctaatctgccgaaaagttcccgtaaagaattattttctcataactgattagttgcaactgttaatctgatgtatatgtttgaatctcttttgaacgtttgacgtttcccctataataagcgcacacagccaacaaccacgtggaactacaatgtttaaactttcctggatattcgggcgcaaaaaggataatgctgcctgttctgaatcggcgccggagaaagtcgcacaaatccctcaacacgatccgctcgaccccatgatcaagctgggaaggattcgcggctggaacgtcgagccggagaaagccccggtcattcgtagtgtgaaagatttcctggaaccgggcctatctgtcgcaatggatagtgcgtatggtgatggaccaaccccggccgcgaaggctgctgcgggcggccagaatccctatgtcgtcccgactatgttgcaggactggtacaattcccaagggttcatcggataccaagcttgcgcaatcatttcccaacactggttggtggacaaagcttgttccatgtctggtgaagatgcagcacggaacggatgggaactcaaatcggacggcaggaagctatccgatgaacaaagtgcgctgatcgcccggcgcgacatggagtttcgcgtcaaagacaacctcgtcgaactcaacagattcaagaacgttttcggcgttcgtatcgcgctgttcgtcgtggagtctgacgatccggactactacgaaaagccgttcaatccggatggaatcacgcccggctcctacaagggaatctcccagatcgatccatactgggcaatgccgcagctcaccgctggctcgacggcagatccgtcttccgaacatttctatgagccggatttctggattatcagcggtaaaaaatatcaccgcagccacctagtggtggttcgtggaccgcagccgccagatatcctgaagcctacatacatcttcggcggtatcccgctcacccagagaatctatgagcgcgtgtatgcagcggaacggacggcgaacgaagccccgctgcttgccatgtcgaagcgaaccagcaccatccacgttgacgtggagaaggccatcgcgaacgaagaggccttcaacgctcgcctggcgttctggatcgccaaccgtgataaccacggcgtgaaagttctgggaattgacgaaggcatggagcagttcgacacgaacctggccgacttcgacagcatcatcatgaaccaatatcagctggtcgcggccatcgccaagactccagccacgaagctcctcggcacttctccaaaaggattcaatgccactggtgagcacgaaacgatttcttatcacgaagaactggagtccattcaagagcacatattcgacccacttcttgaacgccactatttgcttctggcgaagtcggaagaaatcgatgtgcagctggaaatcgtctggaaccctgtggactccacgtccagccagcaacaagccgaattgaacaataagaaagccgcgaccgatgaaatctacatcaactctggcgttgtgtcgccggatgaagttcgcgagcgtctgcgtgacgatccgcgttccggctacaaccgactcaccgacgatcaggcagaaaccgaaccgggcatgtctccggaaaacctggccgaattcgagaaggccggtgcacagtcggccaaggcgaaaggcgaagccgagcgagccgaagcccaggcgggcgccgtagagggcgcaggcgcccctgttcccgccgctccacgcgggactaagcctctcgcgaaagcggccgaggaaggggccagcgaggtcgctgaaccgccgtcgcggccggaccccaaggccgagctgcggaacttgttggtcgatcttttgtcgaagctccaagacctggacgacattaaggcaccggatggcgtagacatagagcacaatgatgcgcctggcttaaagcgcacgtccaaacctggcgtgtctggcatggagccttcggtgttttcgtctaaccgcatcgtcgggcctcgtgatcattcggaactccagagaatcaaggtgaatggaataaccaccttgatcgaaaatccgcgcggaagcattcggcaaggaaaggatgggagttggcgagttcagatgaaacaccactacgggttcatcaagggaacgaaaggcgctgatggggatgaagtcgattgcttcgtcggtccgaatctgggatccaaacgggtcttcgtcgtcaaccaggtgaacaaggaaggtcagtttgacgagcacaagtgcatgctcggcttcaacaacatcaacgatgcgaagtctggatatctgtcctgcttccgtccgggctgggatggtctcggctccatccatgaagttgacctgcccgctttccgtcgctggctggcgaacggcgacaccaccaaaccattcgggggcgagtgatggcattcaaggcctccaaaaagcgcgagcgccgggcacctcttccagtcggaagagggaagcccataattccatcagcaggaatcgaggcctggtatcgaaagcagatgaaggatatttccaagctcatgatctccgactatcgaaacgagattgagaaggcgctgtcccagcctgcggccgaacggttcttcgccagcgacgaatccgtgaacgtcctgttcaagatgacccttcgaagcctacagcagcgatggagccgcatttttgaaggcttcgcggccaagatcgccccggagttcgtcaaccggaccgaagaagccgccaccgccgcgacccttcacagcttgtcggtggccggcgtcgatcagccacgagctgcgtataatgagagcgtcaggaacaccctggaggccgcaaccacttacaatcatactctcatcaccaagatccaagaggaagtccacgagaagatttacacatcagtaatgctgtctctgacttccccgaatccggaagagcaaggagcttccggcataactaacgcacttcgcaaagtcgggaagttttctgaagatcgaatcgaactcatcgcaagagatcaaaccagcaagctttacagttctctgagcgatgagagaatggcggaaaatggcgtcgaggagttcgagtggctacactcttctgccggcaagactcctcgccacacccacctggagaaagatgggaagaggttcaagctgaatgaccccagactttgggagggtccgaaagcagaccaggggccgccaggatgggcgattaactgtagatgcagaaagataccagtcatttgacatcgataggagcgctatatgccgttagttcatggcacttccaatgaggctcgttctgaaaacatcaagcgggaaatcgaagccggtaaagacccaaagcaggctgcggccatcgcttattccatccagcgcagtgagaaagggaagacggcgaaagattgttcgcctaagctcgtcgccgatcttcgcgccctggtggacgctctgtcgaggctcgtgaaatgaaccgcaagacgtgccggcgccgactcgtggtcgatgtaatcagggccaatattcacggcggattcttcagcctgaagtttgccgccatcgatttggcaatcatcggcttcgccatcttgatggcttttggccgataatgctgagaaaatctggattctgactaaaaattctagtccggatagccgcaaattaccgtttacggaaaatagcagtaatttggaaatcctactgccgcgaggctttaacagagccagttcctaatttccgatttagccgcatgcttcaaaagtatatagcctgggaaattagaagtaacgttccaatagaattcatctataagtaacgctataatataacgtcaatctatatactctagacgtattgaaattcaatttttaatcggtaaattggtaatttgaattagtttaggagttgaaagcctcgcggcagtaggcttagacaaatcccgtcaagtttccgagaccaaattaccggattttcgcggctgaggaaactggtaattagatcacaatacaaattataatgtaagttaacagtcgcggctacatctaattattgttccgcttatttacccttagatgtactgcgtatataatacagccatagtccacgactcttcgaattaacgatggcaaagtcgaaaagaaaaattgacgaaaatggatatatgaccatagagggctgcccgatcagctcttatggcgttttccaatattctgctggtcaactcggtcttccgggcgatccgacgcggattgtcaacgtatatcgcccggagtctgccgtcagcgatccggagtacatcgaatctctgaagaatctcccgttgatcgacgagcatgagatgctgtcgggattcgacgatgatgacgatagcgtggcccccgaagacaaaggggtggagggcatcatcacatccaacgcttactacgaagccccatgggcacgcggcgatatccgcatctattcccgcaacatgcagaatcagctggaaaggggcaaagaagacctgtccctaggctatagttgccgctacactgagcaacccggcatctggaacggaacgccttatgaagtcgtccaggacaagatgcgcggcaaccacattgccctggtaaaagagggtcgtgtgccgggggccagagtattggatggtctgtgttttgaccatctcagttttgatttcagaccatccgatgagggtaatgaaatgagtctcaagaaagccaagcggaagccccctgtccagcgcgtagggcaagctgctgactcggcggtcgaagagttgcgcgccctgtggccgaagctatctgcgtctgtccagaagttcctgggcgaagaagagcaggagccggagcatcaggaaggcgcagctccggccgaaccgaccgacagcgagcacctgaccgagcatccgactctggaaggtgctcagaaggatgacgaagagcaggaagaggagccttccgttgtcgatccggccgtggccgccgtcgagccggagcatcaagaaagcgccgcatccgaaatgtccggtgaaggcgaagtcgccgaactgatctctcaggtcaaagccattctggctcgactggagggcacggtagccgaaggggcagacgaagagcatggcgaaggtcaagatgtcgtcgagggcttggaggagcagagcagcctcagcggctcgcaaaccgccagcgacgatggtggtgagagcaaggataacagcgaggaacttcctgaaatggcacagaagaacgcgcaagatgctgcaattcgcggtctctatcgcgacattgctgctaaagatcgcctctacaagcgtcttagctccgtggttggtgcgttcgatcaccgagctatggactcggctgaagtcgctgtttacggcgtgaaaaagctgaacatcagctgtgcgaagggccaggaagctctggcgctcgacatgtacctgaaaggcgtcgaagcctcgcgcggcgcggccagccgtcaatcgaaagcccaggattcggccggttctgctccgcagtgtgccgagctggacagctacctgaagggggagtaactcatgttccagaaacaagtttaccgccagtacactcctggttttccgggcgatctgatcgaggacggcccgaagcgggcgcggccgggtcgaatcatggctctgtcggccgtaactccggctgccaccgccaccggccccaaccgcatcagtcgcgctttcggttatgccggtgacgtcagcgccctcggcgaaggtcagccgaagaccatcgcggctcgtgcttctgaagtcgtgatcggcggcgccaacttctttggtgtcctcggtcatccgaagcactatgctctgttcggttcggccggagactccctggctcccagctatgatctgcccgatggcgccgaaggcgagttcttcgatatggccaccggcctggtcgtcgaaattttcaacggcgccgcaaccgccctggacctggactatggtgacctggtcgcctatgtccccaacaacctggctaccgccgacaacgcgcttggcctgccggccggcgccctggttggcttcaaggctggctccatgccgaccggcttggtccagattcccaacgcacgcatcgttaacgccatcagtctgccggcccagtcggcggggaatctggttgctggcgttaccatcgtccagctcacgcagtaaggaggcgtcatgagccagatcagcaagacccattcgcgcctcgcaggccgcaatgcgaaacctttcgacctgaaaaacatcaccaatgacgccgtggcgtctctgcgccgcatcggcctggtattcgatcacgccgtcgtccaggaccagatcaaggccttggcgaaggccggcgcgttccgctccggctcggccatggacagcaacttcaccgccccggtgaccacgccgtccatcccgactcccatccagttcctgcagacctggttgccaggcttcgtgaaggtcatgaccgctgcacggaagatcgacgaaatcatcggcatcgataccgttggctcctgggaagatcaagaaatcgtccagggcatcgtggagccggccggcactgcggtggaatacggcgaccataccaacatcccgctgaccagctggaacgccaacttcgaacgccgcaccatcgttcgtggcgagctgggtatgatggtgggtaccctggaagagggtcgcgcctcggccatccgtctgaacagcgccgaaaccaagcgccaacaggcggccatcggtctggaaatcttccgcaacgccatcggtttctacggctggcagagcggcctgggcaaccgcacctatggcttcctgaacgatcccaacctgccggcattccagaccccgccgagccagggctggtccactgccgactgggcaggcatcatcggcgacatccgcgaggccgttcgccagctgcgtattcagagccaagatcagatcgatccgaaggcggaaaagatcaccctggccctggccaccagcaaggtggactacctgtcggtaaccacgccttacggcatttcggtttcggactggatcgaacagacctatccgaaaatgcggatcgtgtcggctccggaattgtccggcgtccagatgaaaaaccaagagccggaagatgctctggtgctcttcgtcgaagacgtgaacgcggccgtcgatggcagcaccgatggcggcagcgtgttcagccagctggtacagagcaagttcatcaccctgggtgtcgaaaagcgggcgaagtcgtacgtggaagacttctccaacggcaccgccggtgcgctgtgcaagcgtccgtgggctgtggtgcgctacctcggcatctaacagatgcctattcaccaaaggccgggcttccggcctttgttcactctgactctaactcggttgtaggggccggttagggcataattactaggactacgccaatgactgtttatatcgtttcctccatgactcaatcggtgtcttacaatgcgtatgacacctctgatccgtccaatcctcgcctccagcgaaagattctgattcgcggccgcgcaggcatcgcatccgaaacttccggcttcggcgacatgatttccgacgaggccggacgtccgatctggaccccacagggcgattgtactgccgtgagcgattcggatttcgagctgcttcaggccaataagattttcatgcgtcacatggagaagggttatctgcgagtcgtgaagaccgacatcaccagtgaccaccagcggatttccaaagagactcgcaccatggagcgcgatggattccagcctctggatgctactcgcctgcagcagaaaatcaaggtgaccacagccagcgcttcccaggaacaagagttccggatttaaccgagggtttcggtatggtgattttcgacgaacataagtttcgcacgctgtttccggagtttgctgatccagccgcttatccggacgtgcgcctgcagatgtacttcgacattgcgtgcgaattcatttctgatcgcgattcgccataccggattctcaatggtaaagccctggaagcctgtctgtatcttctgaccgcccacctcctgtcgctgtccacgatgcaagttcagggcgcggctggaggtggcgtcactgccggtgggacccagggcggtttcatcaccagcgctactgtcggcgaggtcagcgtggccaagctcgcgcccccggccaagaatggttggcagtggtggctttccgggacgccttatggtcaagagttgtgggcgctcctcagcgtcaaagcggtgggcggattctacatcggcggtcttccagagcgccgaggcttccggaaggttggagggacgttctggtgatccctggtgcgaatcttctgcgaatggccttcggggtcatcggtactcaaattgtgaaatatcgcaagtttgagcagcgagtgaagaatgatcaagctcagtacgtttccatgttcgaggagcctttcgacctggcagcgtctgttcagcgagtccgacgcgatcagtatgtccagtttaatctggagttccaacggaattacgttatgatcttcgccaactttgagatggttgacttggatcgcgatgtggccggtgaccagttcctctggaccggaagagtctttcagctggagtctcaaggctcctggttttatcaggacggctggggagtttgcctggccgtggatatcggtgcggccaagctcactgatgacgggaaaccgactttctaggtgatgtatgtttgacggcgaactgatagcgaaactggttgtcgagttgaatgcggcgatgacatctgctcaagaggctttgcagttcccggattttgaagtcgtccagaaagctcagccgacccaacagggaacgtcaaccaggccgaccatctttttccagaaactgtttgacattcctcgcggctggcctgccaccgattggcacctggacaacacggcccgcaaatatgtagaaataactcgacagcatgtagagacgactttccagatcagttcccttcattggcagaatcctgaaataactcacgtggttacggcttctgatatcgccaactatgtgagggcttatttccaagctcgatccacgattgagcgcgtaaaggaactggacttcctcattcttcgcgtgtctcaaatttccaacgaagcattcgagaacgacaatcaccagttcgaattccacccaagttttgacatggttgtaagttacaaccaatatattcgcctgtacgaaaacgcagcatattcggccgatggggtattaataggcatatgagtctgaggcgcgattcagagctaatcgccgcgcacctccagatgttaagagccatgcgcggcaggtccgtttcagccggatggtattccacggctcgatatcctgacaaggcaggcggatcggtcggaatacaagtcgcgagaatcgcacgtctcaatgagtacggcggaactatcgaccatccgggcgggaccaggtatattagggacgccattgttcggggtcggtttgttggcgttcggttcgtcagaaacgactttccgggagaaaccgaggtaactaagcctcacagaattaccatcccggctagaccgtttatgcgatatgcttggaacttgttttccgcagatcgcgccgcaatccagaaccggatagccatgaggctggccagaggacagatcactccagatcaagctcttgcccagatcggcctggcgttggaaggatacatagccagaagcatcaggaccgggccatgggtggctaactcagcatctacggtcaggagaaagggattcaacagaccgctggtcgatacggcgcacatgcttcaatcgattagcagcagagtaacataaccaggagatcatccagtgatcagtcagagccgttatatccggatcatttcgggcgtaggcgcaggcgctccggtcgcaggccgaaagctgattctgcgcgtcatgactaccaacaacgtcatcccgcccggaatcgtcatcgagttcgacaacgccaacgcagtcatgtcatacttcggcgcgcagtcggaagagtatcagcgggctgcggcttatttcaaattcatcagtaaaagcgtgaattcgccgtccagcatcagcttcgctcgctgggtaaacaccgccatcgcgccgatggttgttggtgacaatctgccgaagaccatcgccgatttcgccggcttctcagcaggggttctgaccatcatggtcggcgcggccgaacagaacatcaccgccatcgatacgtccgcagcgacttctatggacaacgtggcgtcgatcatccagaccgaaatccgcaagaacgccgacccgcagctggcccaggctaccgttacctggaatcagaacaccaaccagttcaccttggtcggcgccaccatcggcaccggcgtcctggctgtggcgaaatctgccgatccccaggacatgtccactgccctcggctggtccacctccaacgtcgtcaacgtcgccggccaggctgccgatcttcccgacgcggccgttgccaagagcaccaatgtaagcaacaacttcggttcgttcctgttcgccggtgcgccgctcgacaatgaccagatcaaggccgtgtcggcctggaacgcggctcagaacaaccagttcatctacacggtcgcaacttccctggcgaacctcggcactcttttcaccttggtgaatggaaacgccgggaccgccctgaacgtgctgtcggcgactgctgccaacgacttcgtggagcagtgccccagcgagattctggccgccaccaactacgatgagccgggcgcttcgcaaaactacatgtactaccaattccctggccgcaacatcaccgtttccgacgataccgttgcgaacaccgtcgacaagagccggggcaactacatcggcgtcacccaggccaatggccagcagctcgcgttctaccagcgcggcattctgtgcggcggtccgaccgatgctgtggacatgaacgtctatgccaacgaaatctggctgaagtcggctatcgctcaagcgctcctggacttgttcctgaacgtcaatgcggttccggcgagcagcactggcgaggcgatgaccctggcggtgctgcagccggttctggacaaggcgaccgccaacggcacgttcacctacggcaaggaaatcagcgccgtccagcagcagtacatcacccaagtcaccggtgatcgccgcgcctggcgtcaagtccaaaccctgggttactggatcaacatcaccttctccagctataccaacagcaacacaggcttgaccgagtggaaggccaactacacgctgatctattcgaagggcgatgccatccgcttcgtcgaaggatcggatgtgatgatctaatggtttgcggcggactcgatccgccgcgaccttccataaatggagtgaggaataagcaatgatcaacatttctgcgttcggctcgatctgccagttcacggcaagcagaactttcccgaacggattcaccgtcaccgagtttgccgacgatgcggacccaatcgacagcccgccgttcactgcggccgataccggcgtcggcctcaacggtgacatggtagtctggaaccgggcgaacatcctggaagtcgtcgttaacgtcattccgaataccgagggcgagcgcaacctggcagtcctgctggatgccaaccgcaccggaaaggacaagtcgggcgctcgtgatgtcgtcggcctggtcgtggcgatgccggacggcagcaaaatcacctgcaccaacggcaccccaatcgacggcgttctgatcaacgcggtggcaagcgtcggccgtctgaagaccaagccgtatcggttccgatttgaaaaagtgatcaaagccggtactagctgatgaagaaaattccgctgacagcagtccccaatcaagcgatctcatttaacgccggtagcagctattggaagattcgcctgtaccagaacatggacatgatgaatgccgatatcagccgcgacggcgtgatcgtttgccatggggttcgctgcttcggcgggattcctcttctccagtacagccatcagtaccgacctgactatggcaatttcgtcttcgaccgcgacgccgattggacattgttcggcgacggcatcaacctgttctatctggacggcgccgaattcgccgagtatcaggcgcttgccacgaggaaagaatgagcacatcaacgatcagaaccgggacgaacaacgatatccttttggacgacaatggaaacatggttatcctcagggatgtcgaagcgtgcgcccaggacgttcgggcggcgatgctcatgcgcaccggcgaaaacattttcgatgtgaactccggcgtgggatatttcgaatacatcttctcgccgcagaaaagctatgatgacgctcgcaaatccatcgcggatgcaattttatcctcgccggatgtgaccggcatcgagcagcttgacatcgacataaccggggaagtcttcggcgtcgatgcgaaagtcatcaccatccacgggcctgttaccacaggagtttgaaatgagtaccatccgcatccaatacgccaacggcacccaactgttcctggacggcaaaaatccgccgcccctggacccgctgccctcgtttaacccgtctgtcgaagatctggaaggcctggaccgcgaaaagaacatcgacaagggcgactcctcgccggccggtcttcccgttcccccggtaaacgtcgattccaatgtcgacaacggcggaaccatcccggctccggtatcgaccgacgctgctgcggccgaatcggccccagaaggcgcccaggaagctcctgcagcaggccaaggcgacgagaaaggcgccgaggaagccccgactacagccccggtagaaaaggccgaggaaacggcctcgccggccgctgaagaggaaaccccggctcccgccaaggccacctctcgcaaaaccaccagcaagtaaggactcgacatgatcaacgtcagcggcttcggcacaggaattgtaatagtttcagcctcatcgttcccgatggggttttccttgtcgaagttcgctgatgatgagagtccgatatcctccaaagagctggagccgttcggatatgagatgctttatgacggcggcctattcgcctttgacaaggctgctcctctggaagtatctgtatccgtcatcgcagggagcgaggatgatattaaccttcgcatccttctcaattccaaaaagggatcattcagatttcttccgggcagcatcccggatatgacgactctcgtggccactcttcctgatggcggccgcaccgttctgtccaatgggactatcatcaagggtccggccatcgacaccatacagaacaccggacgacgcaaaggcaacacgtacacttttgttttcggtagctatcttggcgcccagactgcgcgtcaagccatttctaacgttatccaatcggtgctggaggtggtctgatgttggggattttcaccagcctcctaagttcgcgatctttttcgattgtggaccaaaacacaaaccagctagttgctgcggatttgaggataagccgggtcaacacccggttttcttctgtagggcaacgccacatgctggaagatggtacgaccaagatggattccagaacgatccaccctatggaaatcatcgtcgaagtattttgcccttcaattgatgtcgtcgatcagatcaatcaattgctcctggatcgcgacacactgtacaaagtcatcactcgcggcatggtattcgaacggatgatgtgtaccagcgaagcgctcaatcagactccggatatgatatcggcgactcctgcgcggctgacattctcccaagttctcgtccagaatcccaagcctataatgttcagaaatgcaggggactcttctatgatcgaccgagggctggccctagctgaagacgtggttggctcggccggcgatctgttcgactacgcagtaaacggcgtccagaacgccgcagacttgttctgaggtgccaattgaactctttcctcaagtctattctcaacacgcctactctcaccatacgcaatgatgttaccaaacttcctgtctggaagagtcttcaagtcaagaaagtggaaatttactcgccggcttccgtagtgtcgaaacctctggcgacgaaagaccagacggaagctcaagtgtacaccgaagctctggacattgatgtgaagaatggaaagatcatccaaccggtgcgactccgcatcaatgctatctgtccggacctgtccaccgttgaaagtatcatgaacgctttcaatgataacacctcgactttcgctatcacttctaagtcgatattggccgataaaatggccatcatggcgctcgatgtagatcagtctccagacatgttgaacgcggctgagatcaatatggaattcgagcaggttgagcctccagtattgaatgaattcgatcctgcgttccctcaagatagtccgacttatggggtacagattcaatctctttctgatgctaatttgctggatttgggcgccatcggcgattcgatatcttcggccgcaaaatcgctatataatcgcgtgaccagctacttctgaggatgtatcatgcttgaaatcaatcttcccgatggccgtcaaactcgcgtacaaatcgaggcgtggtcggcattggatggctgggacctccagcgccgtttcgtcgaattcgctgtcagccaagattccgacttccgccgctctttcaccatggaaatcctgggctatgcgaaagtgctgcttggcgacgatgacgccggcattccgctgaccaccgcggcagtcatcaacaaccacctcggccactggaagaacgtggaactggttttcaactctgttctcaagcacaatggcatcgacccggccacgcacgccgaccggccggactattgggaacaagtcggatcgcagatggccatcgcatttctggccgaggcgtccaagctcattggtccagcaatgaagatcgccgaaggactcgccaacaagccggagtgattcatgtctagtgatttggatgaattcatacttcggtatgaggccgatactgccagagccgagcgcaatctggagcgcctccagaaccagatcaggcgcgtgaacagcgcatcgacgagtggccttcaggatttgcgccacttcgcagacggcgcggccaccgaactcggcagagtcgttccgcagattgattctgtgacgagcgcaattcgcggaatgaacgcgcaactggcaataggcgccactggcgtggccctggtcgcggccggcgtcaaggcgttcatgaacaccagggaccagtacaatcagcagcgcatccaggcgatggacatcggcatcgccccggcacgcttggaagagtaccagagaaaattcgttcgccagtccggtggaaccatcagccgcgagcagggcgcggagatgaccaaaaatctggcagacactttccggcgtgcttatcgcgatatcgggcgagtcggcccggaagcgcgaattctgcgtatggccggcgtcgatgtcgggagcttccaaaagggcatgcggccgctcaacgacatcatcaccgatctggccacgaaaatggccaagctgaagccggacgaaatttctgcctacgctgatgcccttggcgtctcgcgagattacctgagcaccctggcgaagatcggcccggccatgggaaaagtcactgagatgacgactgcggaactccagtccagggtccagggcgagtccaacatccagaaattcaacgatgccctggcgaatctcaaccagacgttcactaccctggaaaaccgagtcggcgaaaagctcgcgcctgcgttcaccaagctgatcgaaatcatcgacaagatagtccaggctattcccaatgaagtggaaagcttcgcgaaggacaccaaatcccgttgggaagatggagtgctcgggaaggcgaccgttggcagtgatatcctatccctcctcagccccggcgccctgctcggtcgcctggcagcgtgggggactcgtcgcggcatggaagaatcagggctcatcgacaaggacaaggttcccggcgctcaaaccagcgaagacctggccaagaaacaagaagaccaggacaaggctactaagtccatgaaagagctagagaagctggctgaccagaccacgaagtctaccaatgattttgcggtggcgatcaacatgttcagtggcgcggtatcgtcgttcgcgaatgccgttgacgagcgccaagcttgggcagcctgggcgggggaaattggtcgggcggtcggcatgggaagcaccgcgccgacttcgcgggccaccggcgtctatccgcacgcgatctatgatcagtcgaagagtggcgcggccggacaagtcttcggcgagccaatcggcgcccagtctcttcgcaatcgcatgttctcgccgcagcgcaaggcagagccggtcaccgttccatcgtacatcaacgatatcatcaaagatgcttcgaagatgtacaacattcctgagctggacatcaagaaactcatatacaccgaaagccgattcaacgccagggccaccagcgaagccggagcgaaaggcctcatgcaactgatgccggaaatcgccaaggcgtatggtatcactgacgtatatgaccctcgccagaacatcctcggcggaacgcgcctactgcgtgaaaacctagatcgagcaaatggcgacatgctgttggccttgacatactatcatggcggactcgatccgaagaactggggcccaaggactcgcgcatatccgggtttggtaatgagcgctccaatcgagctgatggaagaggctcagcgcaagcagaaggctgcggccatgaccgtcgccaacgagacgttcgccccggaaggcggcgacatggacattcgtccctatgatggcgggcgactggaaaccccagaccagggcaagaaggaagatgagcgccgcgaagcccgtcgatatgacgacagggttgtgcgaccggaaattcgcatcatcgaccgcatgccagaccgcagcgacggcgaaatcctcaagatgtctagacgtcaagaggccgaccgggcagattctggattccggaagttcccgaatcaagttcgcggcgagaccaagcagaacatccaggctcaactcactgcaggagccatcgcgcaagtgatcggcgttaaccccaaccagatcatgcgccgcgaaatcagccgttctgacttgctgttcggatacaaccaagccatcctgggcaagcaacaggagatcaaggccgccgcgaccgaagccaacaacgtattcctgtctccagccaagcttgccgaagccacggccaaggtgaacgcagcatcgcgagaaatggatattctcaggacgtacggcgagcaacttctgaagagcgctccagagcgcggccaggagctgaccatcggtcgaatcgacatgttggtcaacgtcaccggcgcgaattctccggaagaggctcgcgagatattcagtaagcagactgcagaccagctgactacggcaatccaggacgctcaaaacgattccgcaactaagatactctactgatgaaaaagagaattctgcgagtaacattcaacatgccttatggacccgaagtcatccgagaggatttggatgttcgggtccggatcatgaaggctgcgttgcggattcagaaccgggcgactatggaaattttcggcctaaccactcagctgcgtgagtctcttctgtcacagttcaccgcgtggaagcaccggcaacgtcaagtcggcagggaagacgaattgatgatcaaagtgtcggtggaagccggctactctgaccaggggcgcgagcaagtttccagagtctttgtcggcgaagtggccattgtcgatatcatttcgccgccaccggacattggaatccgcatccagtgctacaccaggcaaatcgacaggacgaagaccattcgaaatatgccgcccgccaacacgacgttcgtcaagttcgtcgagtggggagcgaacgaaatgggattgaacttcatctgcgataccagttacaacgatcaagttctgaagaatccgggccggtctatcactgtcgcgtcggcaatcctggcgtcgattcaggatatgtacatgccggacgtggccgcgttcgttgatgatgacatcttgatcgtgaaggatcgcgataaagtcattcgccctgatgaggtgaccaacgtcaattcgttcgttggaattccatcttggtctgaatggggcgttgaattccagtgtctgtttgagccatcgattcgcgtggctggaggcgtggcggtcgaatcgctcatgaacccaagcgtcaatggcaactatgtaatcactgctctggaatacgatttggccagtcgggatcggccgttctatatcaaagtcatggggagcccagcagcataatggccagggaaatcaaaccgttcaacatgttcggcgttcactatacttcgcggcaattctctgctgtcgatgggctcagcatgatgtcggaaattcagagtgtgccgccagaagaactgctcaagggaaccagtgtattggcgcatccggaagatcatccggaaggcatctggcttcccttgaccgctgcgaacatcaatctttatgtcgttgatcgagcgaaagtaatagctcccgtacaagttcttgcacttctgtccgaagtggtaattgactggaactttggtttcctcaaagactggaccggagtcaagattccatccagatttgtcgaagatatcaaaagcgtgaagacggcacattcgccttctgtagttgcgagtttggtagcgaacggctcagcctctatgcgcgagttggaagagtattattcgactcaagatgcatttaagatgatagacatcatgacggcgaagagcgtgaacgaggccttggcgtcagaagcatcgcacaacagaatcaaaaagggataattcctaaccgggcctgggaaggctatactagacctgccaaatcagaggctttcccatgtccaatatttctctaacatcagcaaaagctcccgacagaacgcgactgatcgccgctcttgacgctcggtcgcgacgggatgctctagatttcgaagtaatgataccggctcaggttgttcaatatgaccggaccgagaatatcgcgacgattcaacctctcatcacctgggttgacacggaacacaatgccgtccaaaggcaccagctggtggatattcctgtaatttccatgggggctggcggcttccacataagtttcccgattcagcaaggtgacataggctggatttatgcggccgaccgcgacacgtctcagttcctggagtcgttgtcaatgtcgaagccgaacaccggccgcatccataagttcgagcacggcctgttcatcccggacgtattccgtcgatacaccatcaattccgaagattcggccgctatggtcatacaatcgacttctggagcgaccagaatttcgattcgcggcgataacatcaagataactgcgccgtcgaacgttactgtggatactccgcaggcgaacttcaccggcaatgtgactatcgccaacaccctggtcgtaaacggcatcaacgtgaacaaccacggccacctcgaaaacaacccgcctgatgcccggacgaaaggcggcatggttgcttaaggagattttcatggcaagttttgatttttctgatttaacagcggggggggggttgtaatggctaactacaactacatcgtcgatactggtgtgatagtcgcagataccgccgacgttctgagcgacgttgaggccgagttccgcgccgccctcggtgccaatatcaacttggccgcgagcactccgcagggatcgcttgtcgcggccgaggccatcgcccgttccagtgtcatgcggaatgaagcgcgaattgccaataccataaacccgaacgtttcattcggaacgttcctggacgcgatctgtgccttgatggggatcgagcgcggttctgatctgtcaaccttcggctatggagttcaagtcaccggccgcagccaaacccgcatttccaccgggtctagggtccagactccggccggcgcgatcttcacagtgatgagcgatgtcacgatccctgctggtggtgtcgcgaccatcgatatcaaatcgcaggagtatggcaacattcctctgccggtcgggaatctcatcatcatcgacggaacaattggatggtccggagcaaaagtcatcgcctccactcgcgtcgatccgggcagccgccaaatgagcgatgcagagttgaagaatgcccgcgttaatcgattggccatccaaggccgcaactcgactatggccatcaaggcgtatgtgagcgccgttccaaacgtcacgtcggtgaacgtaatcgagaacaacaccggcgccgttcaagtggtgaatggagtctcgtttacccttccgtatgctgtttgggtctgcgtcgccggaaacccggataaacaagcagtcgccgatgcgttgtgggccgcccataacggcggaactccatgggactatggtgcgacgaacaacggcgtcccggtggacggtccgaatggcgttcctgtgcgcgatccggcgtccggtcgaaagtatgtcgtgaagtggaccactccaattatgtacgatggatatgttaacgtaacagtccagcaaggttcctcctctgtagctccggaagccattcagaacgcagtggtcaattacgcccaggggaaagtggaaggggaagaggggctggtggtgggcgcgagcctgtcggcattcgaagtcgccggcgccatcgctcgcgaaattcccggcatctacatcaaactctgccaggtcgcgtgcgtcgcggctggctcgccggctccggctccgggcgatttcacttcggaatacgtcatgagcgcattcggccaggctaccatttccgttggtaacgttcgggtgactttcgtatgactctgcctgcgtacaattcggacatccaacaagctctgaaatggctccataaccaggcgcctggaatcaccggcctgatccagagaaaggcgcaatggtatgacagattcagccgccaattctgggccaactgggagcgcgacgttttccacttgaaaactgccaacccgttcggccttatggtttggtgcatcatcctcggcacgccttcgaaagggttcggcctttatccaaaaaacagttcttgggcattcggtcggctacgccagaacttcatctatagcggtacacaagttccgccaccggcagacgcatcgcctggcggcaacttctacggtggcggcaatgccgaaattctcaacttggacgaaatcaggaaagtgcttcagctaagatatgtagcgctgatttctaacggctcgattgcatatgtcaatcgcatgcttcgttacatattcaatgatgatgagccatgggacgaggcgaccggtctgtacttctatctcatggactcaaccggcgagaatggccctgtggagaacttggcgatatatcggaaagattgggaaggtatggtgctgttgtccagttcgcccagaacgaaccacgtgctgacatcgacccctgccagcgacgccgattggccgggagtcgatccggccgcgagcggtattccggtaacggtcgaaacggcgtccgctacggccccggacggctccgctacggtgtgcaagcttactaagccggccgggagtaccgcttacgtctccgcgccgatagatgggccgctggggtccggtagcactgtaacgttctcgttcttcgcgaaagccggctccacccgtttcattgcaattcagtcggctgccgatttccccagtcgagccgatgccgttttcgacctggattccgggaacgtaatcagcgatcagatgctggacagcagcgtggtaagcgcccgaatgattcgtctggaaaatggctggtggcgttgcgttctcacgaccaagaccgtcagctcttcgttccgcgctgcttacgtcgctccggcagaaaccaacttcagctggattgattcgaattccagcgcggagattgacgtgcttatctggggcgctcagatcgaactgggtgatactccaactggatacttggaaactaccggggcgcccgtaaccatgaccgattatgttttgcagaacgcccagaccggaacagtcaagttcacacagccccttccgaccggagtagaagcgtattggactggagactggaaaggcgggactgcagcagaaccggccagattcgcagtcgggaatgggactcaggatacgtttactctgtcagaccccgcatacatcggcctacccaccagtggggcgttcaagctagaatacagggttggtccggcgcttaatctgtcgccgcaattgatcaacctcatgaatgaccgggcagttggtattatgccgacttgcgccggttgcgatgtcaaagtcattcaggagtaatgacgtgatcacacccgaactgatccccagtccgtttgccgctcagggcgataaagacccgattccacaaacctcctccactggcttcgcaaaccttcgcgacggctatacgccggactacgaaatcagcctggcgtcgaacaacccgcaggccaaagcggtcgagcggaagattcaaaaccaactcttcttcatcgctacccagaacgcacaggcgtggcagcgacaaatggcaccgccgtggtttcagggcatgcctggcggctacgaacagaatgcagaagtcgtgcgcgtcggaaatgacggcataatgcggcgttatcgttccatggtgaatgccaatgcgagcgaccctctcagcagcacgacttgggaagaacaacccgcatggtcggcgatgcgctccaacatcccgatgccggccggaggcccaggcctatcttctggcggagaagtcatcacgaccggccgcaacttcaacgacctgttaaatgggacgtgggagttcttctctgattcagtggttatcgcttctcagaatgcccccgtatatccggcttccgctggtgccgctgctggcatgttggaggcgaaatcttgggtgtccggagccaatacgttctgcgtccaacgctacactgatcgcgtcgggaacgtcgctgtgcgcgggcttaatgccggagcgtggaccaactggatgtatgcggtaaacgtcatggcccttcaacaaggtcgggtcacctatggagtcgcggccggatcggcgaacgcttacacgttgacgctagttccgcagctccaaggcggcctggtggatggcatgattcttcgggtcaagttcaacaccatgaacaccggcgcctccaccatcaacgtctccggactcggcgccaaagccatcgtcggcgcggccaacttccctctcaccggcggcgaacttggccaaggactcatcgctgagcttgtattcgacgcagcaggcgaccgctggagaatcctcgcaggcgcgccacgcatccaagttggcaacgccgatcaagattaccaggcccccagctggaaacaggtgaaggattacgtcgcgtcccaaaagctgactgaagtggactgggctgacgtcgtcaacaagccgaacgtcgctatccaagacactacgccgtggttcgccaatctggagctgtctgacgctcggcctttcatcgatttccacttcaacaacaaccgcgccaaagacttcgactatcgctttatctctgaagctgatgggtcgatggcgttctactctcgccaggggtcagctggtcctacccaggatatcctgttcagcaggtcgaatgttacattcctccagccgcgactggatgttgcgaaaaacctcgcgtacatcgcgaactctggtcccctttggcagaacaccactgccgatcagcctggttggaaattcaccttcgcccaaggtgtggacgccaacaacaacgctgtgatcgcagtcaataccacaaatccggacggctcttatcgctcgcaaatcatgcgatgggattgggcgtcaacgaacgtcatattcaacaaccgtcctctgtttgctggacaatatgttccgtgggactccggaaactttgatccggctaccaagctcactgtcgggactactaacaacatttcggggccgaccggaattcgcaacaccaccagcaacaccggaaatatgaacacctggggttccagctccacgactgcatcatatggcaacgcggcacttcaaatcttcggtagagggggtggcgagcctgcggccatatacttcgacaactcccaaaccggctggtatttgggaatggacaaggacggccaactgaagcgagcaggctggtcgctcggcaataactcctatgtggtcaccgacgaatccaacattcgtttccacgttaattccatggctggtactcctgtatggggcggaaacgaattctgggggccgtggaacttcaacccgaacaccaagttgaccatcaaagccggcacgcaggaaactagcagcactgcgatattcagcggaacgctgccgttcgccccaatcgcgtctctgtccgactattcccaggcgccattgacggtttacaactcgccgactggtccatccgctaagcctgccgttatcgcgttcattcgccctggaaactggggcgcgttcttcggcatcgataccgacaacaagctgaaatggggcggcggatcgctcggcaacagctccagggaaatcgccgattccagcaacatcatgaatctttgggcggccaacccgaccgcgccgtcctggaacggccaaaccgtctggcgatccggaaactttgatccggcaacgaaagtggatttgaacgccgcgaacgccaccaacggaaacatgatcttcaaccgcatcgccggaactggcagcgggatcgcctcttccggccgcgtcggcgcaatcagtctccagaacggcgcaacggcaggcgccgccgcagccgtaacattcgagcgcggtggcggtttcttcgtcaacttcggtttggacacagacaacgttctcaaagtgggcggcggaaacctgggggcgaacgcctatccagtcatccacgccgggaactacaataactacattaaccaggcgctggttcaggtcggtctgggcggagtcggttcctatggcgttttcgcggttttggataatgccgctccaaccgcaaccgttcaacccggagttgtcgtggacggttccattctcatctactcgtcttgcgccgcaaactacaatagcggtcaaaggcctgccggaacttggcgctgcatgggatatgtagtcaaccgggatgccaacactcctgactccgcgacccttttccagcgagtgacgtaaaatgaaatggacgcggatcagaaaccctcgttggctggatgaaacaaacatccacgccatggtgactttcgatgggatcggggaagttcctttcaccgccaatccgcacgacgtggaggcccacggaagggccatccacgctgcgatcctatccggggcgcacggacctatcgccccggtcgatgcgaagcgggagcaggccttgcaggacgctatacgggccagggaaaagcgggctatccttcgtgatacccgctggcccatagatcgtcacgacgagcagaggcggctgggtatcgaaaccacggacggacctgggttgatagcagcccttgttcactggaggcagcagattcgcgattggaatagcggggatcggccgcgacttcccatggctctgaaaacgatgttcaaaaatcaggagtattgatgaaaatcacaaaggatattcttatcaccggaaccgggtgcaccacggatcgggcgatcaagtggctggatgatgtccaggcggccatggacaagttccacatcgagtcgccgcgagccattgcggcctacctagccaacatcggcgtcgagtccggtggactggtgagtctggtggagaatctcaactacagcgcccaaggattggccaacacatggccgcgccggtacgcagtagacccgcgagtccgcccatatgtcccgaatgctctggctaaccgcctggcccgtaacccggttgccatcgccaacaacgtgtacgcggatcgtatgggcaatggttgtgagcaggatggtgacggttggaagtatcgcgggcgcggcctgatccagctgaccgggaagtcgaactattcactgttcgccgaagactccggaatggacgttctggagaagccggagcttctggaaactccggccggcgcgtcgatgtcttcggcctggttcttctggcgcaatcgctgcatccccatggcggaatccaacaacttctccatggtcgtgaaaaccatcaacggcgccgcgccgaacgatgcgaaccatggccagctccggatcaaccgttatatgaagaccatcgccgcgatcaatcaaggctcctgatattcgcccaaaagaaaaggccgcttattcagcggcctttttgctttccggctttgcctcttcaaccatcttgacttcaaccggcgcggcggactcttcctgagtgaccgaatccacatagttccctagtgaactcagaacgccgattaacagcgctcttaccaccttgtccttgactgtctcgcctatgatcttggtcagaacggatattaactcttcccggagtctggggctgattcttggccgaaagcgcttgcgatgctctttgcgatgctctttgcgtttcatgtttagtcctctgtctgcggtcttctcctcaccccgataatggcttggggatgcgctgtgttaatcggaaggttcgggcgctattataactcgtcgaaaatgctcgcgcttaactgtttaacgatacgcaccgcgatattaaatcgccttctttctggccaaggaactctggcggccgggtccggtctaaggcctaatttgtcgacattaaaacgagaaaacccggatcgcctttagggcaatgcgtccgggtttatttctatctagtgtacgctaggatcagtgacttccgccccacccgtccagccagcaatcgaagacggcgtgcctcggcttgtccttggcgccatgggagaagtgcttgaaccggatgacctggcccttgagatactccctgtcattccagcggcgctgtttctcgtcgtgggtcaggctggaggccgacacgttgaaggtgactccaggccacagacgttcgttgcggcagacgaacgcaccgaccattccggacggcgacaggttttctgcgtggctggagcgggccgtgtggccaagttcattgatgaaagcttcattgttgttgtgcatcaactcttccacgtcgatgatctcagcttcatcgtagtcgtatcgcttgactttcacacagtgcccttccttggcagtcgagcgaccgaacttgtacagtccatcagcgcgcttgcccatggaaccttcgaatcccagcattgtgtggcggcgctcgacttcgctgaactgttcgatggaagtcaccagttcctgctcgaccaggtgaatcctctcatagccgaggcagtgacgaaggaagttcacgcgctcggccgccctggctaggcgatcttcggtcggtgcgcgaggatcggtgaaatcatcgaacacatggaaagaccagtccggctcaccgctgtggcggcgaagatcgccggacgacttctggaaaactttcgggtcgctgatgtcgccgcagaccagctcgccgtccaggccgttgaacagtttatcgctgaggtattcgtagatcgattggttgttctgccgcttgagttgacgagtcagcgcctcaccttcgaatacgaagcagcgaaatccatcgatcttcggcgagaaatacatcggcagttggccttccagcagcttcgggtcaaaattcgatgcgagcatgggtttcatacagttctccagaaaagaagcccggcgaaccgggctaaatggcggtaagccggctcagatggtttcgttggcgtggttcagttcggccatgatcgacgcatagcgctcgtccgactccttgatgaacacgccgtcgtacatgacgcctttgcgatccttgatggtgtcgtaggccgcagcgtagcaggcgagcatggtagtgtcgtgctcttccgtcacatcgaacagagtcatgacggccaagaccaggctcttgatggctaatccatgatttccgcgtgccagcgcgccggccagatgtccgaggtgctgcaaatcgtcgccgtaggtgggatgaacttcgacagtctcgctgaagaccgatagatgatcgaacagattttcaccgagttgcgcggccatgatcgtggcaaccaccattacgtcgccgatgccgtctttcacctcgactggtttgttataaacccaggcttcgcaaacttctgcgaactcttcgaccaacttcaggaattgatccttggccgaagagcctttgatcaggttccggtcggaaccccatttaacaaccaggtcgtgaagttcgcgactcatgatttgttcgatattcattctttcgattccttttggatttgggatttgactgcgttgattatggacgccgtgctctggcgcgatccatccttggtggtgccgaagtagaaggccattaccgacttcagctcggcgaaccaatagccgatgatggtgccgatggcgaccgaggatgtcgggtccatcagagcctcgcggccgaatgtgaagattgcgatgatgatgagaatggagcctgtcagaagagcgaatgtgatcgccgggcgaacgaaatcgttctgctgcgccgcaagcctcctcgcagaatccctgtcggccgcctctgcggcgaactggctaagctcggcctggagctggttctgctcagactgaaggcgattttgttcggcttgaatcgcaagctcctggagacgaacgcgctcggcgctctggagttcggcgagacgcgctagagcttccggattcgcgtctagagcgctagcgaccgaggctgggtcggccttcgaccccagcgccgtcgcgacgatagcgccaacggcggcgcctgcaggcccacccaggagcgaccccagagccggggcagccgcgccgatcttactacctatgtctttccagtccatttcgactcctcaaaaagaaaggcgccattacagcgcctttctccggccggtgatttagaactcttcggcttcggtcgcatcgccgacgccaccggcgtcactgcgaggctgttcctgcttgctgtagtccaccttcacctcgccgccgacgaacgacttgtacaggtcggccgcagccttgaagtgatccgggttcttcaccaggccttccagctcgaactggacgccggaccagctgcccttgtcgttcgacatgcctacggtggtcatacggaccaggttggcgaaagtcggcggggtgcgcaggccctgcggggtctgaacctttttctgggacagcgcggtcatgagcttcttcgaggccttgatctgcgaagacgacagggagatcagagcctggccgaaatcgccggtgtccggatcgatgacgatgacgtaatgaccacgggtgtcggcgaagtagtcagacttcttgtcgctgaccgaaccgtcttcgttcggcgcgtacaggcgtccttcgacttccttcaccttggtcgggtctttcatcatttccttgaagtcttcgacgctgatggcacccttgaaaccgccctcggcctcgcgaccggcccagcggatgaactcgcggcggtacgcggccggaatgatcagcaggccggtcttgccgtcgtaaatcttgccggtgacggtgttcaggaacatgccggccttcgcgccttcgatgtacttcgggtcatcttcatcgacctggggagacatcttctgcaaaacctggatgaaggggatggcataggactcggcatcggcgccttcgaagcctgcgccgtcatacgatcccaaatccatgaagtcgggaacttcggtagtcgcgacggcgccgccaccggtggcaactgctacggccttggtttcttcggttgcttcggaagtttcggttttcttaccagccatgttaggctccttgtttgtcgaatttcagttatcgctaactgtgggtttataataacggaagttgcaactaagtaaagcaaattacatatcaagatttgctctttttcaccttcggtttcgtgatcttggcctctttgtattcgtgtacgccgatgaaatctggcagctcttcgcccttctccaggtactcgcgaccgaacgcctggagggtctggtaatggacatcgcggttgatggtggcgtcatagccggcttcgatgatggcctcggccgccttcttcgcatcttccatttcgccgcgaccgaattcggccagaaccttggtcttgatgatgccgtcgttgtcggtgtcttccagccacttccagaacttcgatttgttctcttccttgacggaaatgatggccttcggctctacttttaccgtgcgaccgtccgccagagtagtggtcttctgaccaagctcctccaacagctccggaatggtgttacgcttgagggtcttcagctcctcttccttttcggccagcgccttttgaagatcgaggatttcgccgtccagctgcgaagccttgtccaccaagttcagcagtcgatggccgatgtcggtggcttcaaccgccatttcatccatgacgccaaaatagtcgatttcgcccggcgcgttctctttcaagtattccgggatttcaagctcttgctctttcatgtccgcctccaacttagtgatgttcccttacttgaaccaagtattgagtagatattatgccgcatcttccttgatacggctactgatttacatattaaatttcgtcgcgagtgctaacgtcagcctcaaacacgccatcaacgacataacttgccaggttgcgtttccactccaagctgacctggattttctcgtcgatggaatccagacagatcaggtcgaagtacaaaaccgagttgacggtgccgattcggtgatttcggtcttcggactgcatccgcaactcgttgtcttcgtcggtcgtgtagtaaatggccacgtctgcggcggtgagcgtgatcccgatccctgctgcggccgggttgcccaggaacacctggacgcgcttggcctggaaatcgtcgatcaatttttcccgctcggcctctttggtctcgccgtagtatgtgccaaacgaaattccttgggcctccagatacgccttgatctggtcgatttcctgaatgcgcatggcccagatgatgatggagcgctccgggtcttcctccagcagaccctccagaagatcagtaaacacggcgaatcgcgggttgtcttcgggcggcaggatcaccggctcgccatagacgttgatatagccggatgcaacttgcttgagcttcgaacgcgctgccgcagcatcgaaagatacgtccagcatgaagtcttcgttcttgagaacgaagtggtagtcttcttccacgcgctggtaaacttttcgttgctccggcgacatttcgaagtatatgcgcttgtacaccttgtccggcaggaatgggagtgcttccttcttcgtgacccggaaactgtgcggctcgatcagggaccgcagcttgtccaggttccggaataccgggcgcccacgctcgtctttttcgaccagttgcggcggcatggtttgcttcccttccagcttgcgcatgatagcgatcattcgaggatcgtcactgggaaccaaaacggaaaattcggccacgaacgcccgataggatttcgttccaagaattccatcgcgcaagaattggaactgcatgaacaaatcggtaggcgcccgcgttagaggagttccggaaaggatgcgacgggccacggccttctcacccagctttacgatctttttcgcacgcttggcttgcgggtttttgatcctcgtggactcgtcaacaattgcgcaaaccttgaaagtttcaaggaatcgcaagacttcatcatagccagcctggtgattgatggcgtcaacgttgatggcgaagacgcgaagaactttttcatctgcgaacgtctcggcatacagacgatccaagcgcgccctggcctttttggaagtcggtcggccacgccaatccacgctcaaagtcttgatcgcgacgtgtgtgggaatctcgcgcagaatccagttagtgtggacccctttgggggcgacgatgagcagcgcgtcaacgcgcccctgtaggaagaggcgaacggcatcggccaaagtcgtccaagtcttcccggtgccctgctccatcaggtatgcgaaattccgtttgttcagggacgcggccagggcattgaactggtgctgcatggcctcggtcttcatgcccttgacgggatatgttttggctttcatttgttctccaaatcggcgaggaactgaacgatgttgtccagtccttctgcatagctcgcaacttccaccaaatcgcggctgttaagctcgaacaaatcgagcataggattcagcagcagccaatcggttccgatctttgccaggacaaagccccggccgccccagccgatccgctcccgaaggaatgggatttgcccaggctcaaaacatcttgccattgggcaggtggaggcgcgtttcggccactcctccaacgccttgaactcgacccagaactggacacctcgacgattcaggcaaatcgaatcggacataccagaccgccgcgtctccagaaagtcgatcaggattcggccgagcgagcgttgcttaaacgtattcgccgctttcgtttcgcgatcattcatcgccttcgccctctttggaaactttcttagtttgctcttccagtttggccttctcgcgctcggtcaatatccgtttgatggccttcacgatgaacatgtcgatgccgctgagcttccagcctttgatcaggaaccaagagccggtcggcgtcccttcggcgatctgctttccgtatcgcagatatttctcaggcctgatacggaatcggatttgttgatcaaccgaatcatccacacacatgatgtcgaggaactgcgactggcccttgtacaccgggtttttcccttggtcagccctcttcttctggcgaatcggttcgttctcatcggacagaactttcttcaccatcttgacgatgactaggccatcgtctccatcgcggatatcccgaatgttctgaatggggtttccggaagtcactccaaccagctccggattgtcataagcatgaccccagagcgtgtgagcttcgttcaagtctgcgaattgcacttcagaattcgacaaactagcggcgactttctcccaatcctgaagcgtcttcaggtgggagccggccagctccttatattgggccttcatctctttcagatcggcctttagctccttcagatcggccttcaacagtttctccagttctttgtctcggctgattttcgccgaaagaatctgggcttccagcgctgctacatcagcagccttgtcatcaacatcctgcgccgatatcgggcaattagccatggcgatccttgcggccttaacttcctcgcgaaggcgcaggaacctctcggctttcgccgggccgaagcctttggcgttcatgatgccgccgatcaggcgcccgtccgccactacccagttaagttcggaatgctccgggtccagggccgtatattctacgccttccttggccaattcgcgaaggatggacacagtttgctggtcgtctttcgccgcccgaagacacgcggccgcgtattccaggcgatgataccgcttcatgtagcaggtccagtacgtcaccacagcgtagctgaccgagtgggagcggttgaatccccaggcgccgaatgtcaccatttcctgccacacacggtgagcatcgtccggggcgacgcctatggtcttggcaccctcgatgaacaattcccggcgcttgttgaagaactcttcaccctttcgcgcagacatggctttccggattgccgatgtctgctcccagtcgaactgtccgatgtccttgacgatggacatgatctgttcctgatataggaagacgccgtacgtccctgacagatattgctcgacctgcggaatggtataggtcacaggctcgcggccggccacgcgctcgatatacttggtggccataccagaagacaacggacccggacgggcgagcgccgtgatgtggtcgatgttttcgaacgcggtgatattgatcgcgtttgcgaccgaacgaactgcctgcccttcgaactggaaaatgccggacattttgtcttcgttgagaacatccagaaccgccttgtcgttcaaaggcaagtcgtacaactcctgcgcagtcacacagttcgcgtcctggatgacgcccagagttcgaaggccgagcgcatcgatcttgaggagattcaaatattccgaatccggcttatcgagctgcgcgacgccttcagaagttaccgtacagaagtcgataacttcatcgttgcagaccaggatgcctgccgcgtgtacgccagagtgggatgggtgaatttcgaggtcgcccatgcaggcggacgcgatctcatacttttcgcggaagtcgcggccgggctgagttttctcgaaagtgtcctccaatccttttccatatcgttcgtccgccgacgtatattcaatgatcgagtttttgatgttgtctgtatcgtggaaggggatgccgaagcgctttccgacgtgagcgataaccgacgcggccttgagcgtgttgatgttgcccaacttcaccacgttccaagtgccatacttctgctggagatattcgaacactagatagcgatgggtatcggcgaagtcgatatctatatcgggaagatcggaccgggaaatgtcgataaagcgctggaagagaaggcgatgagggagcgggtcaacctcggtaatgccaaggagatagcagaccaaagagccggccgaagagccgcgagctgggccgaccagcatatgcttcttggcgaacgcgaccagatctgccacgaccaggaagtagctgtcgaaatctttcagctgaatctgcttgatctcttcttggaatcgatcctcatactcctgggtccattccttgatgtggccgcgactgagacggtaggcttgcccctcgcgagccagcgcgacgatatccccatccaggtggatcataggcgccttcgccagtttcacatccgccaattgttcgactaccgcacgagtattggcggcggcggcatcgaactcttcgcgagtcatgatgtggcgtaaacggctccacaactcctcttcggtggcgatgtggcgaaggccgaccgattcccgcaccttccaggccgacgcgaaatcagcatggtcgatggacggcatgtcgttgtaagaggtaattaccaccggctttccgaatgccctggccgtctccatagcgccgtgcgcggcgaccatcgacgcgggattgatgtcaatgtagtcgattccggccagatccagatgggcataggcctcgccagcgaatttgatgacgccgtcagcttcctggaattcttgcggagtcaatccttgattctggaccgacttggaagtcaagcggtagaacttcttggtgtccttggcgagcacccaggctttgagcttcagctctttctcgccatcgtcggcgcatttgatcgggatttccatgccgaatccgcgaggcagttctgccttggtagcggcttgttcccaacggacgtggccccatgttccatcatcgacgatggcgacgaatggggattcgatctctttggcgcgctcgatgatctccgggaatcgaccatatgcggcgccgtaggagtaaccagagcgaacgcggagctgagggaaagacatcatgcggcctccattgcttgatacgcccgatacactcccatgcgcttgcagacttcgtggagcagccgcacgtcgtcgagcgcccggtgtttctgtacatatgggccgcagtagtgctcataaagatgttgcagccgcatgcggtggccgaacaacggcgccgactcttccacagtacagatatcgagcgatgggaaattgacttcgtccaggccgaacttgccgcgagccagatcgcaggtcagcatgaacttatcgaatggcaggttgtgggcaatattcgcgtcggctctggaaaagaagtcgcgaactttctggcgctgatcgaggaaagatgggtgcttgatcaggtcttcgttcttcaacccggtgatcttggtgatgatttcctcgataacgattccaggattgcagatgaactctacttcatccaaaatcttttcgccatcagttatcacgccggcgaattcgatgattctcggctgctttctcagactcaccctttggtggaacgggagtcctgtggtctcagtatcccatacagcgaatatcatgtttgttccctcttatgtcgaaaggccggctgctttcgcgaccggcctgaggagtataccgcgacggctgaagatttacgccttctgtccgtctttcggcgtgatgcggccggagtgcatggtggcgtgaacaaacgccgaatagttgatcgagtccaaggccgaatcggcatccttgaacccgctattcgccaggcgagtgagtttgcccaccatatgcatcacgaacagggcgagccgatggtcatctgcggtcttcgccaccaggccgttcgggaagaggatttccatgatctttccgtacatcaggtcattgcgaccataggtgctctggcgggcgcggaagacttctgctgctgcgtacagattgttgaggacatcttccgcgaaatcatcgggatgagcgtcatcttcgccaggccagacggattccatggcgaacggcgcggcgtcttcggtcgggtcttcggactgagccgtttcagcgagcggagacggggctttcgcaaacgcctcgtcgagggtaggggcggagttcggggcggccgggaacggctcgcctgccatgttgtttggcgcgctatcggggtcgctatcggccgcgacggcgaagaacggcgcatcgcaaccttccaggttcaggatgtaggagtcgatccccaggctattgtaggcatcgatgatgtcctggcgatcatcgaacgccgcgacgatcttggtgacgccttcgattttcttcaggatgtcgagcgcgactgcccgcttgaactgaggtgccggctcggtgttaccatacggccgcatgatgagttcatactcgcgatgttcggcgatgccgagttcgcggtggagcttggccctggtctggaaaaagtggttgtcggttcggccggtgacgaagaaaatcatgaggtcggcgtcgatggcattcctgatgcgacctacagcgtgcgggttgagagtgtccttgtcgagacgagaatgatactcgtcccattgccgttccaaggcgaagctcttgcggtggctatcgtcgaatacgcagccgtccaggtcgaagatgatgatgccattctttggtttgcgttccatattcagatttccttactggttgctttctgggtgacggttttatcgatgaacgtcccatcagaagtgaggcggaaaacttcgccattctggatgaaatcgaacgattgcacgttcatcgtgatgcgaatggattcgctgccgttggtcacttcgacttgtgcgatgtcgccaactttctcgacaatgatcttcatgttacatggacttcccattgacggccacagggttggcctcttgtttttccgatccccagaaatcgcggcgcagttcttcctgctcggccgagcgatccatccaggggcgatagaacttgcactggtagataggttccaacggaacatcaatcacaggaatctgacctggcttcgtctccagagcggccatgaaccggtcataggatttctgctggatttcctcttcattcatcaccttcgacccatagcgcgggaaggcgcaggagccggtggcgacgcagtgcggctggagcaggctgtcgaacataggatagacttccagaaccagccggcgcatttcgcggaatacttcctgatattcaccctgggtccgaacgcacaggcgaaccttcgccatgtcgctgagagtccgcagattgaacttggccgcgatcttcgtttccatgttggaaggaatgattgcgcgagcgtcctggagcgacgcgccggcctccagcagcttctggtaacttgtctgcgcgtctgcgatggcgtcatgccacaggcggttcagctcttcgcggacgtggtaggtcgggtcatgctcgccattgaccgtagccggttcgtcgaattcccagcggaatgcttccggctgaacgacggcgctgatttccagagcgcgactggtttcctgctggtaagccccggtgcgagtccgaacgagttgatgggtgaaattcttgctgacgccctcgatctggaaaatgaagtccacgaactcgaacggcgagcggatggtgtccagcatgtacttccagtggtcgagcttttcggcctcggtcatggtcgccgggtcttggccgcgcatgcgggtggacttcgttcccaagagcaattcccaggcgttctgggtgtaactaatcagagaaatcttcatcagaaatcttccggaattggcgtgaagtggaatttttcggtgagagccagggccaggccttgggcttgctccctgttaaggccatactgctctatctcttccttgagcagttcgcaggcctccagacgcgcctcatactcttcagcctcatggacggatgagaagacggctccatcagaggttcggtacacaagttcgatcgccatggtgacctcagtagcagcggatgatttcggcgcggatgtcgcgacggtcgaggtagtgctcacgaatcttgtcgcgggcacgctcggcctcttcgcggctgccgaacgacaggttgaacgacgtgaaaggcttatcatccagttcagcgccggtctgatacaggattcctaccagaacgaaagacggcgcggtcttcggctgctggtcggtttgcagttcgagaaaggacatagggagacctcttcaggatgatctggtgcgtacattaatagcgctcctgctgagcagctacggtttccggctcatagatgagcatgtcaacgatttccgggcactggcctttcacccagtcgatggccgcgaccagtgcggtggaagcggagaaagagaaagtgcggtaagactcatggatgtacggcgaccccatggaatcgcgctcggtggtgcgcgaaatgactgctttgatattaacgatccggcccatcttcggcctccactttagcgattatatcggacaggcttaacttctcgccattcaggaaataactggcgcgaaacttcctgtcgccctctggcccgacgattcgggccgttattgtgagactcccgccgccaagggcatcggtgtccctgaagaaagctagcagcgcccgcttgagcgctgcttcgcgaggatcgacggccattaacctaccacgttccagccgtgctgagcgcaccacacggcaccggtccctgcaggaagactattcagaaggaacacaggagtcaggcggccatcctcggtcatatggacgaagtagcgggcgccttcaccgagccactcggccttggcgatggcacgttcgagattggccttggtggcgtaggtcttggtgtggttcttgtcggtggagaaggttacttcgcgggccatttgtagattccttttggttgaagggtttcgcgtttcgatgagggaatattacgcccacctgatccagaagtaaagcacttttgtaaattacttcacgaacattttcttggccttctgataagacgaagaagtcatcaggcgctcgatgacgtccatgtcagaaaccagatcgtccagaaggacgttgcgccaggtagcgaaccggccgagcgagaagatgccggcttcatgggtgagattccagatcatggattcgcgctcgtcgcggccgagcggaacgattttgcctttggtctggatggtcggctcgccgtcctcgatgagatgccttttcctgatgccgaaggccgcgcaaacgtaatccatatcccagtcgctgtcccattcgatggtttcgattttaccatctaaagtctccactatccccttagtgatggattcgacgatcagagtatcaccggtgatggacgctcgaaacgttcccactttaggaccagggaaatacacggtctggaagacatcacaggggatggaaagcttgtatcgactcacgatgatggaggttccttcaccgaatgacgggtcgattcccaggtccagccctgccgcagccagattggcgcggaacggcgcggtgctgatgatattcacgtggtcatcttgccggcgaagatactggaagaaagaggagtcgaaaggacggctccaagtgatacgattcgcaagcttagccaccagctgctcatagtagtcggccggtgcgatccaacgcttttcagtcgccagattccagatggaccggtccgacaggccgcccgttactttcctggagtacatgttgcagtggtcgatgcgcggctgggaaatgaactcgccgtcgaggtagatagctttgtgtacagtgacttcgcggaacgggatgccggtgagttggccaatcactggcgagcggaatcgcagaagtgcgttgtggcgctccttattctccggcgtcgccgcgtcgatgatttgggcttgaggaaagcgatgcgcggcgatcagtccggcgagtccggcacctacgatgattactttctgatcaggaatcatgatgtgtcccttatgagtgtacaaaacttgagaggataaaaaagggacccattttcatgagtcccttgaagagctagacgattcaggctcagaggagcggcggcttactcctcctcaccttcggaaccatcggcgccctgatcttcaccgtcgtgctcctggccttcgtcatcggccttctcgtcatcgccctggccagcttcgtcttccttcgaagcgatggcaaccagatcgacccagcccatgatttccagcttgctcaggtagctgcggaccgaagtgccatagagcagatgggccaccttttcgccgaaggattcgatttcgaccggctcaccaacggtgcagtgctcgttgatgtatgcgaacaccttgccgcgagtcgagaaggcctgcggagtgccatggccgtcgccggtcgggatgaagtgagtggcgcgggggcgacgcgagccgttggacttcaggtcttcgcggcgggcttcggccttcttgcggcgctcttcctgctcttccttgcggcgctgcttctcggcttcgcgctcagccttcttctgctcggccaggcgcttgcgctcttcttcgcgagcgactttctgagcttcctgggcggccttcttctcttcggcctttttggctcgctcggcttccttctcggccttcttctgctcgcgctcggcttccttggccttcgccttctcggcctgctcggcttccttcgccttggccttttcagcacgctcggcttccttggcggcggccttttccttcgccttctcggcgcgctcggcttccttcttctcacgctcggccttgcgcttctcttcgcgctcggctttcttctgttcggcttccttggccttggcttcggccttctcggcgcgctcgcgctctttacgttggcgctcagcggccttctcggccttgcgcagggcagcggcttgttccttggtcagctcttcgccttgggtctgttcgttctggtccttctgttccatgttcttactccgggaatgtttaaagggatggcttattggcctgtgaggggattatctctaaactaattgaagaagggaatacccttagcctgaactttcctaaatattttctttcgggaaagtccaaactctagggaacttatttatgttcgagaagttcctagcttttacgcaagaacagtaagtattcgattgcgcgagttatcccagtatacatcaactgactataaggaattgacggtaagttttcttccagcattgcgactcgcttccattccgatccctgcgacttgtggaaagtcatcgcccaaccaaagtcgaatccgccaatggccttctgcgcctccagccgcacatcttcctcggccgaaaagctcaaaggattgaacttcacccagcgctcatagttcgtgccgataatgcgaactttggcaaacagcatttcatccggctcgtcatcatcttcttggccttcggggaccggcttgaagtccagcagaattgcttgctcgccgttcatgatgccatattcgtgctggttcccggtgcacaccagcttctcgccgatttccggttgtacacccttgtagccgaggatgcggcgcgccctggcgttcaagcggcggcgagtattgttgtaggcgcaaaggatcacgccatcgtcatccaggaacgtccgcatttcgtcgtccgacatatcgaagccagcccggactaggatatcatcatactcgcggcagggcaggcgtttgccctggcgaacaaacatcgacgcccgaacgatattgccggcgttgcgctcgatttcggtcatgatggtatcacaactgttctcgtggaaaatctggacgccgcgcacaggaggaacttggccaaagtcgccaatctccaggaccggaattcgatgcgacagaaggcgctcttcatcccactcgccgatcatggacgactcgtcgagcactaccaacttcggcttctcgtcgagcgagtctttgttggcgaacatgatttcgccgtcttcatcttcaccaatcggtcgatagataaagctgtgaagagtcctggcattgacgcagcctttctcacgaagacgcgcggcggcctttccggtcggcgcgatgaagacagtccagtccatcgagcagcaaagttcggcgatgatcttcgcaatggaagtcttaccagttccggcaaaaccggcgagtcgatagacctggcggcggtgcgctcgatcacaccaaccacgataccagttaacgacggaattaatagcgtcgatctgctggctattgggtcggaagcagaatcgctcttcgatctgatcgacggtgaagttagatgctgacatatttgcgttctccaacgctaggtttaattgaattgagactcagtttaagcagaccgtccacagaccacccagtatcacgacgatatttgcggccgtgcggatcgacatagaagtttttcgtgcgccgcaacaggacatagtgccaagcagcgccgagtgtatgaacccttcctttataagggaaggccttaagttgctctgcggccttcttcgccccagggagccagcggacggtcgaaaggaccaagaccgcacccttgacagcctgggaagcggcgcggccgtcctgtgggctatagcgatgtctatcggggtctacccagtggtggttgccgcgccggagcttcaccgtccgggaccggccctcaaacaccacagtaccttcgtgagtaaaaatatgttccgccatggaatgttccttataacgtacagttctgctttacctctgcgcaagaagagtatactatcagctgactcgtcaaagcgagcgaatttaatccaactttacttcggcaggaaagtggccgatactagcgccgccgcctgtactgccctccaaaacagaggatacattaaatgcaagaatgcaagatttcccgcgaccaactcccggtcggtaatccgaatcccaatgtcgacaagacccgcgacccgaacctgaagcccggtttcctgcgccgcagccgcgagctggacccggcgctggcagttcgcattcgtcgcgagctgatccacgccgaagcgtccgacttggccaaggccggatgggtcaattcacagtccagcctctatggatcgaaagccttcccgcgccattccgtcgttcgcgttaccggagttccggaagatggggctttcatcggcatgctgatcggcttcatcgagcatcgcgagcacggcgaatgggcggtcatggaatccggaacgaaagaaggcggcgccgtcatcattccagtcgatcacatcatgcgagcgtcattcgccgaagccgaagagttcgccgaaaagtgggagcggaacttggggtggcgtctcctgcgccagctccgcgagtgcggcgccctggccgggactgaagacgagttcctgcggcggatcatcaatcgatacgttcgtgatcgcacgatcctcgatcaccacaaagtcggcgcggacaaagactacactgatgcagtactcaaaagcatcggcgaaacatggccgaaaattccttcggggaaattcgtcggacaccgagtcgcgcagctcctgatcggccacaagctaggtcgagcggggaccatcctgaatgacctggtggacttcctggagaagttcgcggccgggcgcgataaagttctcaacatcgccatctgtaattgaggtgaatgatatggaagatttgggaaagctgagtccaaagctgagtcctcggcagcatgccgttctactggaaatgtacaggcatcctgagcatccagttcacagatcgccaacgaatttgactcttaaggctttgagacgaaaggggcttgtcgagctatcatggaaggattccgtggctggatatatgttcggtcgccaaccttgctggaacataactgatgccggcagaaggcgaatcctgggagtgctggggaatactatggacaaagagcaaagcgaagatcaccccagcattccggagttcgagaagatcgacgccaaaaaactttatgaggctctggagacgattgcggagctggagaagaagtgggacgaatccgaaaagcgcacacgcgatctggcagaattggagcagccgcaagtggttggctatcgcagcgcagcttctcgcatggtctatgaaaaggactatggactgcagaatcctgagccgatgatgcttgtttcccagcacgaccgcatagccggggcgctcctggctgatttggcgtccatgactaaagcgcgcaatcgctacaacgacctttggaatcgtgctggtaaccgcctagctttggcgcaagttgaaatccgcaagctcacatcagagcgcgacgcagccctggccagggtcgcagaacttgaaaaggcactggcagaatccgaaaagcgcgggagcgaactggccgcgagctattgcgatggcgtgatcggcgatgaatacggccgccctcattgtcgttataaagtggagcgcgatgccgccctggccaagctcgcggaactggagaagccagaccctgactacacacaacacccgcagatcgtaggctacgctcgcaagaaagagttggagcctttgttggacccatgccaacctgacggcggccacatctacataggcttggaccatccgtcgctctggacagaagaaccgccgtatgaatttcttactcccctctacaccgccccggtcacccaagctcagcacagcgtgccggatgggtggaagctcgtaccgatggacccgacgtcgcaaatgacattagtcggccagtcactgcgttctgactcggtaaacagcatcggcgagatttaccggcaaatgctcgccgtagcgccctcacccatcgatccggccgcgcatcctcagccgtgccaacaaccacaggcccatcctgcccgctgcgggtgcgagcggtaagtgccaagcaaggagttcatgtaatggaacagcagaaaccttcggaagtagatggagccatcgccatgaccgatctcgacattcgcattcttcgaaaggcgaagccagaagcgcaggacgagtgcgccgtgtccatgttcgcagcagcgatccgccagaaactacagcgctcccgcgataaaggccgaggcggctggatcgactgcgacgaagacgttctgatcaacggattcgccgaacatgcgctgaaaggcaatgagaacgacctcctggacctggcgacgttcctgatgttcatgtgggtgcgcggcatcgacgatgcgaagattcccccggcgctcgaaaaggcgagacagcacaagatcatggaagcctggagtcgaatccatgaagatggcctaaactccgccagaaaggcgagtgctgcgcgacagttcgtcggagtacctcgccgcaaaggaagaccggagcgacttgcatgaagcctcacgaaataagactggctcaggccgaagaattcctgcgagaactcggcagagggattccggacgacgaacgggtgatggtcggctacgctgaagaagccacagtccagaccgacgagaacggccgcaagctcaacgccggctggtggcctgtgccctggaaggaagggaaatacatcaactcccgatccaacgcctacgcctgtatatcgtcgtccatcaagacgcccaacccgaagacaggccagatgcggtactggcgcggcgaagcctctttcggccacggcctggcgttgatggtcgatgacatcggctccggcaaagggtccaagggcgacttcgaccgcgacgagttccgcgagcgactagagccgaccgcgattgtggagacttcgccgaacaactaccagttctggtatttcttcaaagagccgatgccccacatgctccagttcaaggcgctgctctattcgttcgtggaccaggtgctaaagaaaggcggcgacaacacagtcaaggacgtcagccgttacggccggatgcccttcggcttcaacaacaagcgcgggaaagacggcaagttcaaatatgccgacgaaaacggcaagcccgaactcgtgcgcctgtacagcgccgactattccaagcgctactcgccggaagagatcgcccaggcattcggcgtccgcatcatcatgccacagatgaagaaggtggagctaaaccgcgacgattgggtgtatgaccaagtatggctgaagtatgccgagcacatctgcacgaaatacaagatgggcgaagcggcaggcggccaggtccagcagaatatgtccggcaaataccgcatccgctgtccatggggcgacgagcacaccaacggcgatcctttcggagcatactttcgcggaccgatacctggcgccgagcacgaatatgtgttcggttgcgggcacgatacttgccgcaaagagcatcgccggacttgggcggccttcacggatgaagtcgtgctaccctatatcgtcgaacaacttgaacgcatcaaccgccgtcatatcggcgaggagtagtaactatgcaaaatgatcctggaattctgattaccgccatcggctcattgcttctcggccttctcgtcttcttcgaaggcctgaatggatggaaaataccagtagcgaactttctcgcgtcgctcttgtgcttcttcgtcggcctttctgctttaacctgctggttcgtcttggcgtttgacgtgttttagtcgacgaacggtccggaaattttcggatggggacggaacttattagctctgccggtttaggtaggagataatagccgtccctttcgcctcaatatgtagaggcagtgttacatccgatcatgtaaagcagaaggcggcaaacctaacatgattatcgacgacgataacattcttgatgatgacgaatcggggtccagtgagttcgatctcacacaaatagaagatgctggaatggaccctttgatgaccgccgcgagcaaggcggccgatgatgcgattgcgaggaatgagacgtaccgagcacaaaaggcggcaaagtatgccgaggcgtatgcggaaccagatctgaagaagcgagcgcgattgttgatgctcgaccaggcgttcgatcttccggtcagccgggtggtgaaagggccgttcgatgacttcatcacgaaatacagctcgacgtcagacagcaactacctcgcggtctatgatacgttgttctgtaagggcgacggaactgtcccacacccgcacttcgacgagtttcgcggccggctggtggaccatcgcggcgtggcgttcaacaacaagaccctcgatccgattgacctgatgggcgccctcgctgctgcggccttggacgatccatcgatcaagaagacaattgagacttgctgcgtatgggcgcgtcgatatcgccgcaactctttgatcgagacgtttgagaagaagataccggagtgggatggcgaagagcggatagacactctgctgatcgacttgttcaaaccgttcgacactgagcttaaccggatggtgagcaagtatttctggctgagcttgtactgccgcatcaactaccctggaatctcggcgccgatctcgttggcgttgattggtgggcaggatgcggggaaatcatatttcggcttgttgatctgtaaggagttgtccggtgggcgcgatctggctccagttcagctcgacctgagccgacacgaccagacgccattcctgcgcaatatcaccggcaactcggtcattgcgaacgtcggggaaatgtccggattcaaaaagggcgatatggaacgcatcaaagaattcctggtgcgatcttcggatacattcgatcagaagtttgagcctggcgaaacgatcaagcgacaatggatcaccatcatggacggcaacggatacgatggactccagcgggacgactccggcaaccgtcgattctatccgatgttcgtggcacaacttcccgacgaagatggaaagccgaactgggtcaagccgggcgatggtaatgaaccgttcaaggtggacttcaccgacttcggtcgcaaattctggcaagcgatggctgaatgccgcgcatggatcgaagagcatggtgtcgatggatacttgaatatggtgtctgaagcgaaccgcgaagtgcagaacttctctatttcggaaatggagaatgcgcgtggcgtagttcgtgacgatacgattgacatgtatctgatcaatgttctgatcagttgcgagttcgaagagatcaagcctggcaggaatgccaagaatcctggatggagggctgacaccgtcgccattctgaaatggttcgatattctcgccaggaagaagccgatttctcgtcaccttactccgcacctgaaggcgctgggattcatcccgaataagaacggcctggctggttggtgcttacctgtcgataaggttgcgcctggatggacgaatggcatgcacacgacgttgccgccgttcaatgatgcgcttgtgtacttgctgagaaagggcgacccggatatcactgatgaggctgccatggcaaaaattcgggcagtccgggccgagcgagccaagattttgggcgaggatttctgatgtagtggtggagtgtacttggactaggccgccttcgggcggtcttttctttggtgcggcgtacattcgattccggtggtggccgagtgagattcgaaagctatccggtaattagggtggggtggcgacggtgtattgtggaaagttcgtggacgttggatcgaggattttgtgtggtgagtggatgaattgtggaaaatcgacgattctgactggatttttggggtcggccgcgtcgagcttaccggtaatttacgaaaccaggaattagggtcgagccttagtgccgcgtgggtttgaagggcttaaccggatactttccggtttcggatgcagccgcaaaagtatactacagcgaaaatcgattgcacaatcctaatagaaaaaatctatcacggacgttacctatctttaaaattaattaaattaatagtaatttggtaatttggtatactttggttttgaaagcctcgcggcactaagcttgtacatatcccgtcaagtttccgattccagccagctcgcggcagggtcgccggaaacttccggacttccaatccatgggtcgcggcaacaccaaggcggactaagcggcaaggaccaaaactcgacgaacggaaccgggaatttgggcgcacgacaaaatagctcagctggacatatttctaacattcgatttaacactcctctcaaacactcaccaccatcgtcgcccaccaaccgccgactcgatcctcacccaccagcggatcgctcgtataacatcctataacaccacctaacactcattcatcatcaaacccacccagacctacagcccacccacaagcagcccatagacgcgatccctggccccatagtacaatcgcgccatactcagtgtcgcgacagagcaccaggcccccatccaccaaccgagccaccgcgacgactccagaatcgaactcagggacgcagcaccaaatgaccaaattctacagccccgacgatctagtcacaccacaggaattcgcagacccgcatttcgcggcgatcaaccaaaagcgattcgacctgtacatcgacctgcgcgtccaaggctacagctcctggcgggtcttccgggccatctggggcgaggagcatatggacggtcccgcgcaggcccgcatcttcgcgatggagtccaacccgtactatcgcaagcagttcaaggccaagttgaacgcgaccaaaacgtccgatttgtggaatccaaagacggcgctccacgaactcctccaaatggttcgtgacccaaccgtcaaggactccagccgtctgtcggccatcaaggaattgaacgttctggctgaaatcacgttcgtggacgagtctggcaagaccaggatcggtcgtggtttggccgacttctacgcatcagaagccgaggctcagaccgcgacggtcgctgttgcggccgaagccaatggctatgcgccggaaggcgaagagggcgatttcccgtccccgacgccggaaccgaccgaggaagatcgcgccaaccccatttagacataaaataacatcgttctaggctcgaatcggatcgaactaaggcgacggtagcgggaagggccgaaaaacgattctagggcggttctaggaagtcggagcctaaccctcagaaacgataaagccccggactctagctcagaatccggggctttcttttgggcgccttattcgccagcttcgatgatttcgaagttgtatttgacgccttcgtgctcgaaagtcatcttgccggccgccttcagctgcatgcggaagcggatgtgtttcgaagaaggcaggccgaactcgatgaatgctgcgttggtggaccggaactcgccgcgcttgcctttgacagtcacagccacgccatggcgctgagtgcgtttcttggaaacttccgggtctttccaggagttggcgatggctgccgacaggtctttggactctttggctttctccggagcgttcttggcctcttcgcgcatcttccggatttcttccagcgcttcctcttcggtgatctcttcttcaggcttcagattctcttcctcggccttctcttcttccttcttcttggaagtgcgggttttgtagactttggccggggcttcctcttcctggaaggcttcttcctcggccggcagagcattcaggatggcgaggcagcgacgctcagcagtcttgcggtcagagaaacgcttgacggtcgcatcggcgttgtgggcgttgtagaaggcgaccagttctttcatttctgcgttctggatgtcgccgaaggttttgatggagttggtcatttttgcgatcctctgttttggaagatttcttttgggcttcggtttgtcgccccgttgaaagagattatgcctaggtcgatgctgcgtgtctacatctatttcatcagattgatcacaaagccgacgaacggttgtcggatgtgaaaacaccgcagagcaggctgcggtgtttggtgggcgttggggtgatgtcagaaagtcgggactgtgataggctcgatgggcggatcgccgggcctatcgttgtccgatgcgggcgccgggctggaagggatcgcacccgaccgaagcgccagcgattccgactgccggcttacctgtggtggcggtggagccgctggtgcctttggagggattggaggcaggtcatttcgacccttgaccatttgcagaggttctggaagatcgggcagcgcgccagcgatttcaccatacgtccgcgccggatcgtcgccgaacatttcggcggatcgggtatctttgacgatctggctgatggccgtcacatcgccgcccggttctgccggatcgatgcccgtgaatggagtggtcacgcagcgcatgttcggatgggtaggcagatttttcaggactatggaatctgcccagacatacggattcttgtggttgccgggtccgtggctgatgatctcggcaggaatatggccgttcatggtgagccattccgccatcccttgccgagtcagcgggcttaccacgatctggccagtagactcttcggcgacggcgaacagatcaccgagcttgaacccgatgattatgtagttggacctggactcgccgacgaaagccagggtttcgatgttgtggtggatatcttgatcttcccagatgtacagcatggcgttactcctcaataaggctgcttgttgtgttcgaccagagacataccggccggaactttgaagcggacgtattcgatcatcatcgccgttcgacgccgattcgtgccagactcgtcattaacgaagagttcgcactgatgcggaatgacccgcgtcaccaggtcttcgcctttcgagccgtagaacttgatgtaggatgcgacgcctcgcgtcatgttcagacggatcgtttcgcagagtcgctgcgcggccgacgcgctagacagatcggtcggactgaccgtcacccagtaatggccactttgttctttatcggacataagctgccctccaatgagaaagcctctgcgactcggcagaggctggttgttgttagtcgcgcttcaacagaacgactttgtcatatgcgcgatatttaccgcgccagtcttcccagtagtcgccggccgggcaggtaagctccagagtgatttcgtcgcgccagcattcgacagaaagtacaattgccttgttcctggctgcaccctctgcggcatctgctctgagcttaatcagaatttcgtcgccagttttcagctcatcaactcttacaactttggccattgcgttctcctattgggtagcgccacgagggcggatcgggtcgatgtcatgtaagcagatggtgggatagtccctggccagcttgagcttaaagtccacccagtcagcaccgatgagcgccgcgacttcgatgcttactttgctgtgcggcgccgctccagatcgcaggactatagcacgacgccgaacgggatcattgacatcgacatgagttagtatttcgtcgccgacgagcaactcacaagccatcaatattttggccatcatacactcctatgagaaggcgcgaccagggcgatcccagccgcgccgatggattaacgtttgtgaaggatggacacggtgtccacatcgaggatgcggatggtacggcgacggcgcggattgctgcgttcatggatgcgaatcaggttcgcaactggagcttcgtccaccacccatacgtcttccggtttctgcgtccggagcaggaccgtcacttcagtattctgggcgaggccgttgcagatgaaagtgaacttggacgagggagttctgtacatttcgagattcctttttggacttctggtccggcttctcagccggtgaagagattatgccctgattctcaccgccgagtaaagcatttgtgtaccaattctcccgtcaggtggaaccaaagtgcggtatcgcttatggctacgctaccgcgccatggcccttcttgctcgcacactgcgaaccacaagctgatttccatccttgccaggactcggccgaaggattcgagccgacgccggctggccaggatgtcgacattcacccgccgattgatttcgtatcggcgaccgttgatgacgaagaccaggcgcagggtgcgtccgtccagacattcccagtatttggtttcataccgaagccagtagcgattgccagccgggcctaccatggtcatttaatcgatgctcctggccgcgccacgcggtccggtcggcggcgcaggatcgaaccgaccaaggatgtagtcgggccggcgcgcttcctgaggacacacggcgagaaggcgccatcctgcgtccagggcatactggagttcgtccgtgcagcagtcttccttgagcagcagacggttgacgctctggagattcggaccagggatggccgagctggtgtgcgagttccagccttcgatgccgtgcaccatctgcggttggttgatgtagccttcggacctgccagccaaccggctcgcggccagctccaggcgttccaacatgggtcgcagagcagcttccgggtcaacgtcgtcccagagaaggaccaggctgatgatggtgtacggatagtccttgtccagatcccaggctgaagcggtcagacggctcaggccgatttcactacacagcacgggaatgtcgttgctccaggtggacggctcccagttccgctcaccaggattcccgattgtcacgccttccaggtttcccaggagaacgtggagcttgctgacatattccgcctccaaggctttccgctcttcgtcggtctggttgtggcgatagaaggatggagggctgacttttgcatgatagagtttcattactgttcctcggttttggaagatttgcacgttagaaaatggtgtcgcagtatttctcgaaaggactttgacgcttcttctcgcagatcgcacaggtgatttccaggtcgggcagttcactgtaagtcttgccgagatacaaccagcgcttgcacagactgcggccgtccgacgtgaagaagtggactttgcgagcattgccgggttgcgcccagccaccttgatcgtttttgcgcttgctcatggcgatatttcctttggatctggaatccatgccgtccgttcgctcacccaaactccatctacatagatcaggactgacagagcagtcgcgccaaacccgaagcctacatagaatgaaccgggatcgatttccatggtggcgctattagtggcgctattgcaatcgacttcaaagtcgaatagcgaatggccactcataccatcaccatgtcgatttcattgatgaagaaatggacatcgataccatcggcgcggccggtgtaacgcagccgagtcgtcccatcaatgtgggcttcctcgacgccgatgacttccaggatggtgtcgttgcagtaaagcttgacgaacatcttgatgccggagccaatcgccgcgaaggcgatctgcttgtacaggtcttgcttgatcatgctttgcgctcctgtttgcggatgtattctgccctggcttcggcttcgaacttcgcccaaagcgcgttgtcgactggaccccagggaccggtctgagtcccgtccaccggcgcgaacttgccaccggcgcgacgatacttggacagagttctcaggctgatgattttctcttcttgggaatcgagttggacgatcacttgacatacttcccgaagtagcaggtgtggagtatttccaggcctttggagatagccttcagcttgatgccgaaattcttgatcgcccagtccagatcgtggtgatagaactcgatgatgttgacgatttgaccggcgctgtagtggatgacgcgaaccttgccgttccagcggaaatcttcgcggctgtttacggcctcgacttcgatggtgtcgtttctgccgatggtccatttggagctagtcatgtcgcaatcctctttttggagtgtttcgcgtttcgatgaggtaactatacctcagtcacctcatcgagtaaagcacttttgaacatattatctgaagtttctggaagacagatccatcggcggattcagtcagtggaaccgagactccatccgttgcgggcgaaggccgagcgaccagacagcttgcggcactggatggagctgccatcgtcgaaggtataggatacggcccagtccaggcgctcgcgacgtactgctgcggcagcgatgtcttccagacgggctttgagaagtttttctgctttggtcatttcgagttcctctttggagcgcttcgggtttcgatgagatgactatacctcagtcatctcatcgagtaaagcacttctgaggaattatctgaagtttctggaggccagaaattgccgccagagccagtcaacgtgatcgttgaggtagcgctcgccatcggacgacagagccaggcagccatcctttatgccgagcttggagccggaaatccattcgaactcgaactggagcgttcctgggcgagggatatgggacaggctgtacttttgcacggtcaggaatcctctaaaggtttggagttcgcgatggccgcgactttctgcatgccgatgcgatagaattcggcctcttccctggccttgaccatctgctccctggcttcgcacgccagcttgtgctgattgttggcgttctggatgcttccgtccagactcctgtccagttcttcccgaagagccttctgcgacgctagctcggcctccaaatcctggattctgatctgaagctggcgattcctttcagaagtctcgttttcgcgggcgatggagttctgaaggcattcgtcaagacgagtattttcgcgcaccagctgatgcttttcgactttcgcctttcggcatgtctctcgcatcgctgaaagctcactcgcatgcagatcgtcatccgggtctttacgctcttccttcgactccatccgcaggtagtactggccggctgcgaaggcgagcactgcctggtcggcatacgctgcggcatcggtcatgtatctggatttgtagcgaggcagaaacttgcactcctctggatcccagaggagactatcggcaataggccagaatttgcggaagccatcaggatcgacttctacattgaccatttgcagctggccggcctccacttcgacttccagaggaacctgaatggcgccggtgatgtactggaagtacactatgctagacataacacaatcctcataagaagtcgcggccgggaccatcccagccgcatcgtaatcactcttcgccttcgtccgcgctcagccactcttcgaaggcgaaattcactttagactcgacccaatcctgaagctcatcggcgaactcgtcactgtcgatgtccatggtgattcccataacttccatgttccatagcgcggcattcagttcgaactgtaccatctgctcgccatcgacttccaacaggatgcggtctgcgacttcatagtcgtctacatcgaacagatggccgcccgccaggaggtgctggacgaaagcttcatcgaggttggtgacttcgatctggacttgtttggtcattttcgtatccttacttagcgactttgaattgggctttgaggttggccagttcagctttcagatctatcatcgcctgaccgcgcaggccttccatttcagcctcgctgattgcgatcttggctgcgcggattttgtcgttgatttgatctttggtcatttcggcttccttttgtttgaagggttttgcgtttcaatgaggagattatgccgaaagtcagaatggaagtaaagcatcttgatgagaaaatttctgcccaccgacgaacggtcgtgctcgaccgtcgatggagggtgtgcataatcgaagtcgcacgacgcgaccggtgatgccccggcgaaccggggcggggttgttaggcggtgcgctcggcggcgcgttctgcgttacggtcgtgcgccatgcgcgcccatactgcggcccagcgcgctttatcggcagagttcggcttgtacacgtcgtcagggtgtggttccgggccgtaggcgttgcagctttcgtcgtattcgtaggtcatcatcttgccctcaaggggtcatggcccggcgaaccgggcgggtgattacttgcgatatttcttaatcaggtcgtgtgccatggcgatggcatcagaataggtttctccgccggcctccatttccttcacagccttattgcgcagtgcgttcagcttgttgccgttgatggtgcctttttcatccttggcagcttcgcaggagtcgcgcagagttttcagggcttggtaggtggcgttcatcgtcttgttctccgggtttcgcgtttcgatgaggagattatgccgatagtcagaatggaagtaaagtgtctgaatgaagaaatttctgaacaccgacgaacggttgtgctcgaccgtctgctgcggtgtcgatatactcggcctattgcgaacaatggactgattaa

SEQ ID NO: 20 - DNA, 65643 bp, Pbunavirus EPa22
  source 1..65643: mol_type = genomic DNA; note = EPa22
atgtacaaactcaaccctgcactgcgagcggtctggcgaactcgcgcccgttacaaagtcatttatggcggccgggcgtcttcgaagtcacacgacgcaggcggtatcgccgtttacctcgcggccaactatagactcaagttcctctgtgctcgccagtttcagaaccgcatcagcgaatcggtctacacgttgatcaaggacaagattgagaattctgagtacaacggcgagttcattttcacgaagaactcgatcaagcacaagatgaccggatcagaattcctattctatgggatcgcccgtaacctgtcggaaatcaagtctaccgaaggcatcgacattctctggcttgaggaagctcactacctgacccaggagcagtgggaagtcatcgagccgaccatccggaaagagaactcagaaatctggatcatcttcaatccgaacgaagtgacagacttcgtgtatcagaacttcgtggtgaagccacccaaagacgccttcgtcaagatgatcaactggaacgaaaatccgtttctcagtgagacgatgctcaaggtcatccacgaagcttatgagcgcgacaaggaccaggccgagcacatttatggcgggattccgaagactggtggcgacaaatccgtcatcaatctcaagttcattcttgcggccatcgacgcccacaagaaactcggctgggagccggccggatcgaagcgcatcggcttcgacgttgcggacgacggcgaggatgcgaacgcaactacgctcatgcacggcaacgtcattatggaagtggacgaatgggacggcctggaagatgaactgctcaagtcgtccagccgcgtttacaacctggcgaagatgaaaggcgcctcggtcacttatgactccatcggtgtcggcgctcacgtcggatcgaagttcgccgagttgaacgatgccagtcccgacttcaaactgatctatgatccattcaacgcgggcggcgctgtcgataagcctgatgatatctacatgaagctgccgcacacgacgatcaagaacaaagaccacttcagcaacatcaaggcgcagaagtgggaagaagtcgcgacccgattccggaagacttatgaagcggttgagcatggaaaggtttatcccttcgacgaattgatttcgatcaactctgaaacgattcacccggacaaactaaatcaactgtgtatcgaactttcgtcgccgcgcaaagacctggacatgaacggccggttcaaagtcgagtccaagaaggatatgcgcgagaaacgcaagatcaagtcgccgaacatcgctgactcggtgattatgtcggccattctgccgatccggaagcccaaaggtttcttcgacttctaaacacagaaaagcccggatcgctccgggcttcgggtcttactcggtgtggttcctggcgctgagtgtcgacgcaacggcctcgccgactcccagggcttcctggccggccgcgagcgcttcggcttccgactcgacgatgaaatcatcaccttggccatcgcctggcggaacctcgaccagcacggcttcttcgccttcgaaccgcaggtcataggtcttttcgacggacagaccgtaacgagcgttgagcgcgtcccagagctgggcctcataggtccgcaggtcttgcagagctttctggtggctgagcatggccatgtcaacggcccgttgcagggtttcgtccaggacgttgaaccgaatgcgaagagaacgaatccgctcgacgacttccgcatccactacatgtctttcgatcattacttttcacctttgctgaatgtaacgttgtagccgttgtcggccaggtaggtcagggcgccttcgaaggaagttccgacgaggtgctttagcttcatttcgcgttgcgcggccagccagaatgcagttccggagaactcggcgcggccttcggccaagaccctgccatcaggcccggcgatccgtacatgcacggaagatagcttgatcggcatcagtgaatacctccactggcttgcgacggcatgctttcggcgcgtgcggcttcgcagtccgggcagggacatgcctggcggacgcgctccagctcgtcggcatccatgacatagagcttcccatcggcagtgtcgtgcgccatggcgatgttcgggaagtcggtggcgctcaggccggcgacagcgcggatttcgtcccaaagcaccagatgctcggcattcagtcgggcggcgagcgcttcgtgctctttagcgacgcgcgccatgaactcgtccatccggaatgcgaattccgcatcgatggcacgggccgaggccatggagctgagtcgaatcggttctttcttcatgatgattctcttttggttggcggttgttcgctgctcaggcctattacagtctgagcagcatgatgaagatgaacgcaaggaacgcaaacggcacaagtatgccggacatcagctttgacaggcgctgcatctcagcgtatttctcggttgacattccgtgctgcgccgcctcagctgcgaagcgggctttcgcctcgataacttccgggcgtagcgacaggacatactctaaggcctcttcccgcgctttttcggcctcgaccgacctagggtcgcgggcagagacttcgctgtgccctggcctcgcgggatgggcttgcagagatggaggaagttcagcagccacgactccatagtcggcgcaggcccaagcgatcccgatgaggatcgcgaggatggattggacgattcgcagcatcactttgtcgctagggaagttcataatcaatcctccaccgaccgaacgatttccatattgcgcccggcattggcccctgcattgaaggcgcgccgaccgtcgctatcgtccagacgcatgagcttcgtaacattggacttcttgtagccaggatcgccgaaatgttcgtgaaccgcagcttccttcaccacaaccagagacgttccggcagaagataccagctccatacgcttcctggttatggactgaaggcgatagctgatttcctgggtcgcggccagtttgaattgcgcggcaacctttacgttgaaacgttcgtacccttgcgccttctgatactcccgacacagacgatcaatggcctcgaccagggagttgaacatgttcaccgccagctcaacgtccgacttgtagcctttgaagcgtacggcatgaccccagcgcttggtagtgcttccgtcgcgggcgctcctggatgccttagccgatgctctgtggttgttgatgccaccggcgaaatccatgatgcagtcattgtacgtcgccacggccactgagaaaaacttcatccagttcgggattgcggaatagtaacgagtggcaatttgctcatcgaactcttcgcgaatctcgccggtagcttcgaagtcgtgaaggtcatatttgtccttcaacttcttcacacgctcggctgcgatggccgcttcgtgcggactggaagagtcggctgccatggcggtcagtttgcggatgcggtctttcgccttctcgatggcttcaggggtgaattcgttctggtcggtcatggtcggttccttttgtctgaagggtttcgcatttcaatggagctattctgccttcattcagaatggaagtaaagcactttcttccactatttcggcatcgactggaagaaattccagatccaatcacctgctaccagcaagaggatgagggcggcaaagaacaagacagcggccgcgagctgtgcgcccggcttcagtttgggatggctgagcttgggctctacgggaacggccggagcgctagcgctgcaaccggcgtctcctgggccgtagccgatgccgcgttcacacgcctggagcgacaccagggatttaagatactcggtctgcttttgcgactcttcgtagatgccggcgacggcgaaccagagggcgaacactacggacgtacacacaacccaggcgccggtcagcaggagggccagcgggccgatgacgaagacggtagcagccaggacgattgcgccgccccagatgatgaagccggccagaccattagtgatgtcgacacacaactttttcattttcagattccttcggttacgggatggaggggatttgaaactctgcgccgccgagaacatcaatgacgacttcccagagcgtcggaacagaccactggtaacggtcgaagtcggtttcaggatcgacgcccagcgtcacataggaagtggcaggccatttatgaacattgcctttccgcatgagagtcgccacgcggccgtcaccgagcggattcgtcctgtgcggaacgtacgcagacatcgaatattgctgcccggcgtcgacaacaaatctttgcctctggcgcagacatacagagcccacaggattccagccgcgaccgccgcaagcctggcgagccgaagaatgctcataaccttcgtgagtcatttcgccgaggcaagccgagcgatcctcgtaatagttgatgttctccatcgatccaaccagcaccagagactcgaaatcgaatcgatgatcgtggatggccgagtgattgaagcaaagccgacgcggcagctccgggtgccaaacatggaggcgaccggccggaagttggacctgaatgaaccccaggccgtgcagagtgatcttgtccttcatcgggtcatggacggtgctcatggataatcctcagtagcagaaatgtattgtgagagttacgattgacaagccggtcgcccatagaagggcgaaccaggccatggctttgatggtcgtgtagatcatccgaagaattttccggcacagatcggaccaatgcccatttcgatggatgcgtggttggtcaactcgcgaccgcagcaggagcactgaccagtcttccgaccgtaggcgactgccgattccatcggcttttcgaacatcttcagaacgtcgtcgtgctcagtatcggtgcagtcgcgactcttgatgaatttgccattggtgatccggccgaggtagatgtcgcccaggacgtacaggctaccggcgttccggctgtgagcgctagcctctttcacaacaacgatgagcggctcctcgccttcgccagctaggcggattttcgggcgcttgataccagactctttcgccttctcaaacgctttctcgatgccggaaatgtccagagtcggcgcagcagcttcctgcgcagccactttctcgcgatacttggcgaggctttcgatggcgcgcttcgcagcagcgatctgattttctgtcaaggagccgtatttatacaacgactcctgaaggctctgagcgaagctgaaggaatttccagtccaccactcgatgatgtccgggtgcgcggcttcgaaggccttaattttgaggtcgcgctcttgcgcagcgctacagattttctcgatgcgcttttctgccgccttagcacggctcttggcgcgctgctccgggctggttttgtactctttgtatccgacgccgccgcaggcaaagcaggtgcgaccataagacgaagggccacggtacaggccggtgcctgcgcatttggtgcacttgtcgcgatacagcttcacttccttccgggagttcgggcgggcacccatggacacgtcttccagggtcttcggcgcttcgttgttgatctctacggtagcgaagtcatcacccaggtcttcgaagccggtgaacagattctctgctgcgttcatgtcgattctcctgtttggaaagttcgtttcgatgagttgactatacgccagaaatggaaaaacggtagcgatttctcactaccgttcgtcgggtcgaagacaatcaatacatgtcgctattgatcttgaacccatgctcagcgccgtcgttgtagtcgtactcaacataactgtcgcagtagtcgttcaaatgctgaatgatgcctagaacgtcgttcgcggccttgtgccttttcgcggcgatggtcttggcgatgctgtcgccgacttccagggcttcggccgtccggcgatggatcagcaggcgactccaaagatagagccggacgcgacgaatgatgtctcgatggcgccccagtcgtccgtgcaactcttcaatttcttgctcgcgagatttcactactcgtcgaagctgctgaacttccagttccaaatcggccttagtagccatgtccacctcaaaaaggaaaatcgtctgggactccaggaagttcgacgattattgttgagcctgatcgatccagaatgcatccgaccgagccggccctgtggggatagggtctacacgaactataacaggtgacttccctgactattcgccaggtcgatcctccacaccatctgcaaattggcgggcgcttcgacttcagttttcgttcgtccaggacggcgcgtctgtcgcaggaaaggcagcgtgccttaaccgacgtaaccatgggtatagtcgatcattcggatgagctcatcatcctctgattctctcgacttcagaccgcccaaagagtccgactggccgtcgcatttcgcatcgatatccatcgaagacaggaatcctgccgatactgcgatgatatcaactttgtcgccggcattcttgaagccttcgcactcagcatcgagggccacaattgcactcgcggccatgttcacatgactgatgaggtcggggaagatcacaggaacttcacgcgacatgccacggaccgtcagcttcaggactacatacttcatactcactatcccttttgtatgtgaggaaagaacttgctgttttccggatggtgaaaacgctcggtcgcaggcggtctttcttccggacattgaatcgtcgaaggcgggaaaaccgcgccggcgataatcgccgcgaggagtgcagcggatgtcgacatccagagggcggtttccaggctcacccgaacttccggacggcgcggcttcattcgctccaccctcttcctggctcataggatggcagaccgccgccgcgaatccaattgtcccacatacggttcagaccagtcggtggctggggcggcggactgtagaatccgggagtctcagtgctgctcaggaaataaggcgtgcaaacggcctggacgaccaattggtgccgctcccacatcttatcaatcgctcttagcatgacgtcttcgcactgagccttactgtcgaaccgtctgctagtatggtccggcatctggacgcagccgtctccagtgcaaaggaaagcagtagcaatccatacggtgatactcgccatttcgtcaccctctttagttgatgagcagagtctattccatctgctcgccaggagtaaagcgcttttcgtcgggataaatgccgatgatgtctgcgtcgagcatccaaatctccacggacggatcgtcgctgctgatttggtacaggttgtacagctcccgtccgccgacagcgcgctcgcctcgcggctcaaccgccagaaccttgccgtgcccttctccgtgctcgtccaggtatatgacgtgatcgccgacttcatagctttctttcgtgacgaggcgtgaacgcgagctgttctgcgattccactacccaggaatccagcacgccgcctttcatgtcgcgaaacaatcttgccgatttgtcgcaatcgaatacgcccagaacttcgccgtctttcaacacgatatgtacgattggcaaaagagtattcatgtttaatctccattggttgataattagagtctaatctgccgaaaagttcccgtaaagaattattttctcataactgattagttgcaactgttaatctgatgtatatgtttgaatctcttttgaacgtttgatgtttcccctataataagcgcacacagtcaacaaccacgtggaactacaatgtttaaactttcctggatattcgggcgcaaaaaggataatgctgcctgttctgaatcggcgccggagaaagtcgcaaaaatccctcaacacgatccgctcgacccaatgataaagctgggaaggattcgcggctggaacgtcgagccggagaaagccccggtaattcgtagcgtgaaagatttcctggagccgggcctatctgtagcaatggatagtgcgtatggtgatggaccaactccggccgcgaaggctgctgcgggcggccagaatccctatgtcgtcccgactatgttgcaggactggtacaattcccaagggtttatcggataccaagcttgcgcaatcatttcccaacactggttggtggacaaagcttgttccatgtctggggaagacgcagcacggaacggatgggaactcaaatcggacggcaggaagctatccgatgaacaaagcgcgctgatcgcccggcgcgacatggagtttcgcgtcaaagacaaccttgtcgaactcaacagattcaagaacgttttcggcgttcgtatcgcgctgttcgttgtggagtctgacgatccggactactacgaaaagccgttcaatccggatggaatcacgcccggctcctacaagggaatctcccagatcgatccatactgggcaatgccgcagctcactgctgactcgacggcagatccgtcttccgaacatttctatgagccggatttctggattatcagcggtaaaaaatatcaccgcagccacctagtggtggttcgtggaccgcagccgccagatatcctgaagcctacatacatcttcggcggtatcccgctcacccagagaatctatgagcgcgtgtatgcagcggaacggacggcgaacgaagccccgctgcttgccatgtcgaagcgaaccagcaccatccacgttgacgtggagaaggccatcgcgaacgaagaggccttcaacgctcgcctggcgttctggatcgccaaccgtgataaccacggcgtgaaagttctgggaattgacgaagacatggagcagttcgacacgaacctggctgacttcgacagcatcatcatgaaccaatatcagctggtcgcggccatcgccaagactccagccacgaagctcctcggcacttctccaaaaggattcaatgccactggtgagcacgaaacgatttcttatcacgaagaactggagtccattcaagagcacatattcgacccacttcttgaacgccactatttgcttctggcgaagtcggaagaaatcgatgtgcagctggaaatcgtctggaatcctgtggactccacgtccagccagcaacaagccgaattgaacaataagaaagccgcgaccgatgaaatctacatcaactctggcgttgtgtctccggatgaagttcgcgagcgtctgcgcgatgatccgcgttccggctacaaccgactcaccgacgatcaggcggaaaccgaaccgggcatgtctccggaaaacctggccgaattcgagaaggcaggtgcacagtcggccaaggcgaaaggcgaagccgagcgagccgaagcccaggcgggcgccgtagagggcgcaggcggcccggttcccgccgctccacgcgggactaagcctctcgcgaaagcggccgaggaaggggccagcgaggccgctgaaccgccgtcgaggccggaccccaaggccgagctgcggaacttgttggtcgatcttttgtcgaagctccaagacctggacgacattaaggcgccggacggcgtagacatagagcacaatgatgcgcctggcttaaagcgcacatccaaacctagcgtgtctggtatggagccttcggtgttttcgtccaaccgcatcgtcgggcctcgtgatcattcggaactccagagaatcaaggtgaatggaataaccaccttgatcgaaaatccgcgcggaagcattcgacaaggcaaggatgggagttggcgagttcagatgaaacaccactacgggttcatcaagggaacgaaaggcgctgatggggatgaagtcgattgcttcgtcggtccgaatctgggatccaaacgggtcttcgtcgtcaaccaagtgaacaaggaaggtcagtttgacgagcacaagtgtatgctcggcttcaacaacatcaacgatgcgaagtctggatatctgtcctgcttccgtccgggctgggatggtctcggctccatccatgaagttgacctgcccgctttccgtcgctggctggcgaacggcgacaccaccaaaccattcgggggcgagtgatggcattcaaggcctccaaaaagcgcgagcgccgggcacctcttccagtcggaagagggaagcccataattccatcggcaggaatcgaggcctggtatcgaaagcagatgaaggatatgtccaagctcatgatctccgactatcgaaacgagattgagaaggcgctgtcccagcctgcggccgaacgtttcttcgccagagacgaatccgttaacgtcctgttcaagatgacccttcgaagcctacagcagcgatggagccgaatttttgaaggtttcgcggccaagatcgccccggagttcgtcaaccggaccgaagaagccgctaccgccgcgacccttcacagcttgtcggtggccggcgtcgatcagccacgagctgcgtataatgagagcgtcaggaacaccctggaggccgcaaccacttacaatcatactctcatcaccaagatccaagaggaagtccacgagaagatttacacatcagtaatgctgtctctgacttccccgaatccggaagagcaaggaacttccggcataactaacgcacttcgcaaagtcgggaagttttctgaagatcgaatcgaactcatcgcaagagatcaaacaagcaagctttacagttctctgagcgatgagagaatggcggaaaatggagtcgaggagttcgagtggctacactcttctgccggcaagactcctcgccacacccacctggagaaagatgggaagaggttcaagctgaatgaccccagactttgggagggtccgaaagcagaccaggggccgccaggatgggcgattaactgtagatgcagaaagataccagtcatttgacatcgataggagcgctatatgccgttagttcatggcacttccaatgaggctcgttctgaaaacatcaagcgggaaatcgaagccggtaaagacccaaagcaggctgcggccatcgcttattccatccagcgcagtgagaaagggaagacggcgaaagattgttcgcctgagctcgtcgccgatcttcgcgccctggtggacgctctgtcgaggctcgtgaaatgaaccgcaagacgtgccggcgccgactcgtggtcgatgtaatcagggccaatattcacggcggattcttcagcctgaagtttgccgccatcgatttggcaatcatcggcgtcgccatcttgatggcttttggccgataatgctgagaaaaatctggattctgactaaaaattctagtccggatagccgcaagttaccgtttacggaaaatagcagtaatttggaaatcctactgccgcgaggctttaacagagccagttcctaatttccgatttagccgcatgcttcaaaagtatatagcctgggaaattagaagtaacgttccaatagaattcatctataagtaacgttataatataacgtcaatctatatgctctagacgtattgaaattcaatttttaatcggtaaattggtaatttgaattagtttaggagttgaaagcctcgcggcagtgggcttagacaaatcccgtcaagtttccgagaccaaattaccggattttcgcggctgaggaactggtaattagatcacaatacaaattataatgtaagttaacagtcacggctacatctaattattgttccgcttatttacccttagatgtactgcgtatataatacagccatagtccacgactcttcgaactaacgatggcaaagtcgaaaagaaaaattgacgaaaatggatatatgaccatagagggctgcccgatcagctcttatggcgttttccaatattctgctggtcaactcggtcttccgggcgatccgacgcggattgtcaacgtatatcgcccggagtctgccgtcagcgatccggagtacatcgaatctctgaagaatctcccgttgatcgacgagcatgagatgctgtcgggattcgacgatgatgacgatagcgtggcccccgaagacaaaggggtggagggcatcatcacatccaacgcttactacgaagccccatgggcacgcggcgatatccgcatctattcccgcaacatgcagaatcagctggaaaggggcaaagaagacctgtccctaggctatagttgccgctacactgagcaacccggcatctggaacggaacgccttatgaagtcgtccaggacaagatgcgcggcaaccacattgccctggtaaaagagggtcgtgtgccgggggccagagtattggatggtctgtgttttgaccatctcagttttgatttcagaccatccgatgagggtaatgaaatgagtctcaagaaagccaagcggaagccccctgtccagcgcgtagggcaagctgctgactcggcggtcgaagagttgcgcgccctgtggccgaagctatctgcgtctgtccagaagttcctgggcgaagaagagcaggagccggagcatcaggaaggcgccgctccggccgaaccgaccgacagcgagcacctgaccgagcatccgactctggaaggtgctcagaaggatgacgaagagcaggaagaggagccttccgttgtcgatccggccgtggccgccgtcgagccggagcatcaagaaagcgccgcatccgaaatgtccggtgaaggcgaagtcgccgaactgatctctcaggtcaaagccattctggctcgactggagggcacggtagccgaaggggcagacgaagagcatggcgaaggtcaagatgtcgtcgagggcttggaggagcagagcagcctcagcggctcgcaaaccgccagcgacgatggtggtgagagcaaggataacagcgaggaacttcctgaaatggcacagaagaacgcgcaagatgctgcaattcgcggtctctatcgcgacattgctgctaaagatcgcctctacaagcgtcttagctccgtggttggtgcgttcgatcaccgagctatggactcggctgaagtcgctgtttacggcgtgaaaaagctgaacatcagctgtgcgaagggccaggaagctctggcgctcgacatgtacctgaaaggcgtcgaagcctcgcgcggcgcggccagccgtcaatcgaaagcccaggattcggccggttctgctccgcagtgcgccgagctggacagctacctgaagggggagtaactcatgttccagaaacaagtttaccgccagtacactcctggttttccgggcgatctgatcgaggacggcccgaagcgggcgcggccgggtcgaatcatgtctctgtctgccgtaaatccggctgccaccgccaccggccccaaccgcatcagtcgcgctttcggttatgccggtgacgtcagcgccctcggcgaaggtcagccgaagaccatcgcggctcgtgcttctgaagtcgtgatcggcggcgccaacttctttggtgtcctcggccatccgaagcactatgctctgttcggttcggccggagactccctggctcccagctatgatctgcccgatggcgccgaaggcgagttcttcgatatggccaccggcctggtcgtcgaaattttcaacggcgccgcaaccgccctggacctggactatggtgacctggtcgcctatgtccccaacaacctggctaccgccgacaacgcgcttggcctgccggcaggcgccctggtgggcttcaaggccggctccatgccgaccggcttggtccagattcccaacgcacgtatcgttaacgccatcagtctgccggctcagtcggcggggaatctggttgctggcgttaccatcgtccagctcacgcagtaaggaggcgtcatgagccagatcagcaagacccattcgcgcctcgcaggccgcaatgcgaaacctttcgacctgaaaaacatcaccaatgacgccgtggcgtctctgcgccgcatcggcctggtattcgatcacgccgtcgtccaggaccagatcaaggccttggcgaaggccggcgcgttccgctccggctcggccatggacagcaacttcaccgccccggtgaccacgccgtccatcccgactcccatccagttcctgcagacctggttgccgggcttcgtgaaggtcatgaccgctgcacggaagatcgacgaaatcatcggcatcgataccgttggctcctgggaagatcaagaaatcgtccagggcatcgtggagccggccggcactgcggtggaatacggcgaccacaccaacatcccgctgaccagctggaacgccaacttcgaacgtcgcaccatcgttcgtggcgagctgggtatgatggtgggcaccctggaagagggtcgtgcctcggccatccggctgaacagcgccgaaaccaaacgccaacaggcggccatcggtctggaaatcttccgcaacgccatcggtttctacggctggcagagcggcctgggcaaccgcacctatggtttcctgaacgatcccaacctgccggcattccagaccccgccgagccagggctggtccactgccgactgggcaggcatcatcggcgacatccgcgaggccgttcgccagctgcgtattcagagccaagatcagatcgatccgaaggcggaaaagatcaccctggccctggccaccagcaaggtggactacctgtcggtaaccacgccttacggcatttcggtttcggactggatcgaacagacctatccgaaaatgcggatcgtgtcggctccggaattgtccggcgtccagatgaaaaaccaagagccggaagatgctctggtgctcttcgtcgaagacgtgaacgcggccgtcgatggcagcaccgatggcggcagcgtgttcagccagctggtacagagcaagttcatcaccctgggtgtcgaaaagcgggcgaagtcgtacgtggaagacttctccaacggcaccgccggtgcgctgtgcaagcgtccgtgggctgtggtgcgctacctcggcatctaacagatgcctattcaccaaaggccgggcttccggcctttgttcactctgactctaactcggttgtaggggccggttagggcataattactaggactacgccaatgactgtttatatcgtttcctccatgactcaatcggtgtcttacaatgcgtatgacacctctgatccgtccaatcctcgcctccagcgaaagattctgattcgcggccgcgcaggcatcgcatccgaaacttccggcttcggcgacatgatttccgacgaggccggacgtccgatctggaccccacagggcgattgtactgccgtgagcgattcggatttcgagctgcttcaggccaataagattttcatgcgtcacatggagaagggttatctgcgagtcgtgaagaccgacatcaccagtgaccaccagcggatttccaaagagactcgcaccatggagcgcgatggattccagcctctggatgctactcgcctgcagcagaaaatcaaggtgaccacagccagcgcttcccaggaacaagagttccggatttaaccgagggtttcggtatggtgattttcgacgaacataagtttcgcacgctgtttccggagtttgctgatccagccgcttatccggacgtgcgcctgcagatgtacttcgacattgcgtgcgaattcatttctgatcgcgattcgccataccggattctcaatggtaaagccctggaagcctgtctgtatcttctgaccgcccacctcctgtcgctgtccacgatgcaagttcagggcgcggctggaggtggcgtcactgccggtgggacccagggcggtttcatcaccagcgctactgtcggcgaggtcagcgtggccaagctcgcgcccccggccaagaatggttggcagtggtggctttccgggacgccttatggtcaagagttgtgggcgctcctcagcgtcaaagcggtgggcggattctacatcggcggtcttccagagcgccgaggtttccggaaggttggagggacgttctggtgatccctggtgcgaatcttctgcgaatggccttcggggtcatcggtactcaaattgtgaaatatcgcaagtttgagcagcgagtgaagaatgatcaagctcagtacgtttccatgttcgaggagcctttcgacctggcagcgtctgttcagcgagtccgacgcgatcagtatgtccagtttaatctggagttccaacggaattacgttatgatcttcgccaactttgagatggttgacttggatcgcgatgtggccggtgaccagttcctctggaccggaagagtctttcagctggagtctcaaggctcctggttttatcaggacggctggggagtttgcctggccgtggatatcggtgcggccaagctcactgatgacgggaaaccgactttctaggtgatgtatgtttgacggcgaactgatagcgaaactggttgtcgagttgaatgcggcgatgacatctgctcaagaggctttgcagttcccggattttgaagtcgtccagaaagctcagccgacccaacagggaacgtcaaccaggccgaccatctttttccagaaactgtttgacattcctcgcggctggcctgccaccgattggcacctggacaacacggcccgcaaatatgtagaaataactcgacagcatgtagagacgactttccagatcagttcccttcattggcagaatcctgaaataactcacgtggttacggcttctgatatcgccaactatgtgagggcttatttccaagctcgatccacgattgagcgcgtaaaggaactggacttcctcattcttcgcgtgtctcaaatttccaacgaagcattcgagaacgacaatcaccagttcgaattccacccaagttttgacatggttgtaacttacaaccaatatattcgcctgtacgaaaacgcagcatattcggccgatggggtattaataggcatatgagtctgaggcgcgattcagagctgatcgccgcgcacctccagatgttaagagccatgcgcggcaggtccgtttcagccggatggtattccacggctcgatatcctgacaaggcaggcggatcggtcggaatacaagtcgcgagaatcgcacgtctcaatgagtacggcggaactatcgaccatccgggcgggaccaggtatattagggacgccattgttcggggtcggtttgttggcgttcggttcgtcagaaacgactttccgggagaaaccgaggtaactaagcctcacagaattaccatcccggctagaccgtttatgcgatatgcttggaacttgttttccgcagatcgcgccgcaatccagaaccggatagccatgaggctggccagaggacagatcactccagatcaagctcttgcccagatcggcctggcgttggaaggatacatagccagaagcatcaggaccgggccatgggtggctaactcagcatctacggtcaggagaaagggattcaacagaccgctggtcgatacggcgcacatgcttcaatcgattagcagcagagtaacataaccaggagatcatccagtgatcagtcagagccgttatatccggatcatttcgggcgtaggcgcaggcgctccggtcgcaggccgaaagctgattctgcgcgtcatgactaccaacaacgtcatcccgcccggaatcgtcatcgagttcgacaacgccaacgcagtcatgtcatacttcggcgcgcagtcggaagagtatcagcgggctgcggcttatttcaaattcatcagtaaaagcgtgaattcgccgtccagcatcagcttcgctcgctgggtaaacaccgccatcgcgccgatggttgttggtgacaatctgccgaagaccatcgccgatttcgccggcttctcagcaggggttctgaccatcatggtcggcgcggccgaacagaacatcaccgccatcgatacgtccgcagcgacttctatggacaacgtggcgtcgatcatccagaccgaaatccgcaagaacgccgacccgcagctggcccaggctaccgttacctggaatcagaacaccaaccagttcaccttggtcggcgccaccatcggcaccggcgtcctggccgtggcgaaatctgccgacccccaggacatgtccaccgccctcggctggtccacctccaacgtcgtcaacgtcgccggccaggctgccgatcttcccgacgcggccgttgccaagagcaccaatgtcagcaacaacttcggttcgttcctgttcgccggtgcgccgctcgacaatgaccagatcaaggccgtgtcggcctggaacgcggctcagaacaaccagttcatctacacggtcgctacttccctggcgaacctcggcactcttttcaccttggtgaatggcaacgccgggaccgccctgaacgtgctgtcggcgactgctgccaacgacttcgtggagcagtgccccagcgagattctggctgccaccaactacgatgagccgggcgcttcgcaaaactacatgtactaccaattccctggccgcaacatcactgtttccgacgataccgttgcgaacaccgtcgacaagagccggggcaactacatcggcgtcacccaggccaatggccagcaactcgcgttctaccagcgcggcattctgtgcggcggtccgaccgatgcggtggacatgaacgtctatgccaacgaaatctggctgaagtcggctatcgctcaagcgctcctggacctgttcctgaacgtcaatgcggtcccggcgagcagcactggcgaggcgatgaccctggcggtgctgcagccggttctggacaaggcgacagccaacggcacgttcacctacggcaaggaaatcagcgccgtccagcagcagtacatcacccaagtcaccggtgatcgccgcgcctggcgtcaagtccaaaccctgggttactggatcaacatcaccttctccagctataccaacagcaacactggcttgaccgagtggaaggccaactacacgctgatctattcgaagggcgatgccatccgcttcgtcgaaggatcggatgtgatgatctaatggtttgcggcggactcgatccgccgctaccttccataaatggagtgaggaataagcaatgatcaacatttctgcgttcggctcgatctgccagttcacggcaagcagaactttcccgaacggattcaccgtcaccgagttcgccgacgatgccgatcccatcgacagcccgccgttcaccgctgccgataccggcgtcggtctcaacggtgacatggtagtttggaaccgggcgaacatcctggaagtagtcgtcaacgtcattccgaataccgagggcgagcgcaacctggcagtcctgctggatgccaaccgcaccggaaaggacaagtcgggcgctcgtgatgtcgtcggtttggtcgtggcgatgccggacggcagcaaaatcacctgcaccaacggcaccccaatcgacggcgttctgatcaacgcggtggcaagcgtcggccgtctgaagaccaagccgtatcggttccgatttgaaaaagcgatcaaagccggtactagctgatgaagaaaattccgctgacagcagtccccaatcaagcgatctcatttaacgccggtagcagctattggaagattcgcctgtaccagaacatggacatgatgaatgccgatatcagccgcgacggcgtgatcgtttgccatggggtccgctgcttcggcgggattcctcttctccaatacagccatcagtaccgacctgactatggcaatttcgtcttcgaccgcgacgccgattggacattgttcggcgacggcatcaacctgttctatctggacggcgccgaattcgccgagtatcaggcgcttgccacgaggaaagaatgagcacatcaacgatcagaaccgggacgaacaacgatatccttttggacgacaatggaaacatggttatcctcagggatgtcgaagcgtgcgcccaggacgttcgggcggcgatgctcatgcgcaccggcgaaaacattttcgatgtgaactccggtgtgggatatttcgaatacatcttctcgccgcagaaaagctatgatgacgctcgcaaatccatcgcggatgcaattttatcctcgccggatgtgaccggcatcgagcagcttgacatcgacataaccggggaagtcttcggcgtcgatgcgaaagtcatcaccatccacgggcctgttaccacaggagtttgaaatgagtaccatccgcatccaatacgccaacggcacccaactgttcctggacggcaaaaatccgccgcccctggacccgctgccctcgtttaacccgtctgtcgaagatctggaaggcctggaccgcgaaaagaacaccgacaagggcgactcctcgccggccggtcttcccgttcccccggtaaacgtcgattccaatgtcgacaacggcggaaccatcccggctccggtatcgaccgacgctcctgcggccgaatcggccccggaaggcgcccaggaagctcctgcagcgggccaaggcgacgagaaaggcgctgaggaagccccgactaccgccccagtagaaaaggccgaggaaacggcctcgccggccgctgaagaggaagccccggctcccgccaaggccacctctcgcaaaaccaccagcaagtaaggactcgacatgatcaacgtcagcggcttcggcacaggaattgtaatagtttccgcctcatcgttcccgatggggttttccttgtcgaagttcgctgatgatgagagtccgatatcctccaaagagctggagccgttcggatatgagatgctttatgacggcggcctattcgcctttgacaaggctgctcctctggaagtatctgtatccgtcatcgcagggagcgaggatgatattaaccttcgcatccttctcaattccaaaaagggatcattccgatttcttccgggcatcatcccggatatgacgactctcgtggccactcttcctgatggcggccgcaccgttctgtccaatgggactatcatcaagggtccggccatcgacaccatacagaacaacggacgacgcaaaggcaacacgtacacttttgttttcggtagctatcttggcgcccagactgcgcgtcaagccatttctaacgttatccaatcggtactggaggtggtctgatgttggggattttcaccagcctcctaagttcgcgatctttttcgattgtggaccaaaacacaaaccagctagttgctgcggatttgaggataagccgggccaacacccggttttcttctgtagggcaacgccacatgctggaagatggtacgaccaagatggattccagaacgatccaccctatggaaatcatcgtcgaagtattttgcccttcaattgatgtcgtcgatcagatcaatcaattgctcctggatcgcgacacactgtacaaagtcatcactcgcggcatggtattcgaacggatgatgtgtaccagcgaagcgctcaatcagactccggatatgatatcggcgactcctgcgcggctgacattctcccaagttctcgtccagaatcccaagcctataatgttcagaaatgcaggggactcttctatgatcgaccgagggctggccctagctgaagacgtggttggctcggccggcgatctgttcgactacgcagtgaacggcgtccagaacgccgcagacttgttctgaggtgccaattgaactctttcctcaagtctattctcaacacgcctactctcaccatacgcgatgatgtcaccaaacttcctgtctggaagagtcttcaagtcaagaaagtggaaatttactcgccggcttccgtagtgtcgaaacctctggcgacgaaagaccagacggaagctcaagtgtacaccgaagctctggacattgatgtgaagaatggaaagatcatccaaccggtgcgactccgcatcaatgctatctgtccggacctgtccaccgttgaaagtatcatgaacgccttcaatgataacacctcgactttcgctatcacttctaagtcgatattggccgataaaatggccatcatggcgctcgatgtagatcagtctccagacatgttgaacgcggctgagatcaatatggaattcgagcaggttgagcctccagtattgaataaattcgatcctgcgttccctcaagatagtccgacttatggggtacagattcaatctctttctgatgctaatttgctggatttgggcgccatcggcgattcgatatcttcggccgcaaaatcgctatataatcgcgtgaccagctacttctgaggatgtatcatgcttgaaatcaatcttcccgatggccgtcaaactcgcgtacaaatcgaggcgtggtcggcattggatggctgggaactccagcgccgtttcgtcgaattcgctgtcagccaagattccgacttccgccgctctttcaccatggaaatcctgggctatgcgaaagtgctgcttggcgacgatgacaccggcattccgctgaccaccgcggcagtcatcaacaaccacctcggccactggaagaacgtggaactggttttcaactctgttctcaagcacaatggcatcgacccggccacgcacgccgaccggccggactattgggaacaagtcggatcgcagatggccatcgcatttctggccgaggcgtccaagctcattggtccagcaatgaagatcgccgaaggactcgccaacaagccggagtgattcatgtctagtgatttggatgaattcatacttcggtatgaggccgatactgccagagccgagcgcaatctggagcgcctccagaaccagatcaggcgcgtgaacagcgcatcgacgagtggccttcaggatttgcgccacttcgcagacggcgcggccactgaactcggccgagtcgttccgcagatcgattctgtgacgagcgcgattcgcgggatgaacgcgcaactggcgataggcgccactggcgtggccctggtcgcggccggcgtcaaggcgttcatgaacaccagggaccagtacaatcagcagcgcatccaggcgatggacatcggcatcgccccggcacgcttggaagagtaccagagaaaattcgttcgccagtccggtggaaccatcagccgcgagcagggcgcggagatgaccaaaaatctggcagacactttccggcgtgcttatcgcgatatcgggcgagtcggcccggaagcgcgaattctgcgtatggccggcgttgatgtcgggagcttccaaaagggcatgcggccgctcaacgacatcattactgatctggccacgaaaatggccaagctgaagccggacgaaatttctgcctacgctgatgcccttggcgtctcgcgagactacctgagcaccctggctaagatcggcccggccatgggaaaagtcaccgagatgacgactgcggaactccagtccagggtccagggcgagtccaacattcagaaattcaacgatgctctggcgaatctcaaccagacgttcaccaccctggaaaaccgagtcggcgaaaagctcgcgcctgcgttcaccaagctgatcgaaatcatcgacaagatagtccaggctattcccaatgaagtggaaagcttcgcgaaggacaccaaatcccgttgggaagatggagtgctcgggaaggcgaccgttggcagtgatatcctatccctcctcagccccggcgccctgctcggtcgcctggcagcgtgggggactcgtcgcggcatggaagaatcagggctcatcgacaaggacaaggttcccggcgctcaaaccagcgaagacctggccaagaaacaagaagaccaggacaaggctactaattccatgaaagagctagagaagctggctgaccagaccacgaagtctaccaatgattttgcggtggcgatcaacatgttcagtggcgcggtatcgtcgttcgcgaatgccgttgacgagcgccaagcttgggcagcctgggcgggggaaattggtcgggcggtcggtatgggaagcaccgcgccgacttcgcgggcaaccggcgtctatccgcacgcgatctatgatcagtcgaagagtggcgcggccggacaagtcttcggcgagccaatcggcgcccagtctcttcgcaatcgcatgttctcgccgcagcgcaaggcagagccggtcaccgttccatcgtacatcaacgatatcatcaaagatgcttcgaagatgtacaacattcctgagctggacatcaagaaactcatatacaccgaaagccgattcaacgccagggccaccagcgaagccggagcgaaaggcctcatgcaactgatgccggaaatcgccaaggcgtatggtatcactgacgtatatgaccctcgccagaacatcctcggcggaacgcgcctactgcgtgaaaacctagatcgagcaaatggcgacatgcggttggccttgacatactatcatggcggactcgatccgaagaactggggcccaaggactcgcgcatatccgggtttggtaatgagcgctccaatcgagctgatggaagaggctcagcgcaagcagaaggctgcggccatgaccgtcgccaacgagacgttcgccccggaaggcggcgacatggacattcgtccctatgatggcgggcgactggaaaccccagaccagggcaagaaggaagatgagcgccgcgaagcccgtcgatatgacgacagggttgtgcgaccggaaattcgcatcatcgaccgcatgccagaccgcagtgacggcgaaatcctcaagatgtctagacgtcaagaggccgaccgggcagattctggattccggaagttcccgaatcaagttcgcggcgagaccaagcagaacatccaggctcaactcactgcaggagccatcgcgcaagtgatcggcgttaaccccaaccagatcatgcgccgcgaaatcagccgttctgacttgctgttcggatacaaccaagccatcctgggcaagcaacaggagatcaaggccgccgcgaccgaagccaacaacgtattcctgtctccagccaagcttgccgaagccacggccaaggtgaacgccgcatcgcgagaaatggatattctcaggacgtacggcgagcaacttctgaagagcgctccagagcgcggccaggagctgaccatcggtcggatcgacatgttggtcaacgtcaccggcgcgaattctccggaagaggctcgtgagatattcagcaagcagactgcagaccagctgactacggcaatccaggacgctcaaaacgattccgcaactaagatactctactgatgaaaaagagaattctgcgagtaacattcaacatgccttatggacccgaagtcatccgcgaagatctggatgttcgggtccggattatgaaggctgcgttgcggattcagaaccgggcgacgatggaaattttcggcctcaccactcagctgcgcgagtctcttctgtcgcagttcaccgcgtggaagcaccggcaacgtcaagtgggcagggaagatgaattgatgatcaaggtgtcggtggaagccggctactctgaccaggggcgcgagcaagtttccagagtttttgtcggcgaagttgccattgtcgatatcatttctccgccacctgacattggaatccgcatccagtgctataccaggcaaatcgacaggacgaagaccattcggaatatgccgcccgctaacacgacgtttgtcaagttcgtcgaatggggcgcgaacgaaatgggattgaacttcatctgcgataccagttacaacgatcaagttctgaagaatccgggccggtctatcactgtcgcgtcggcaatcctggcgtcgattcaggacatgtacatgccggacgtggccgcgttcgtcgatgatgacatattgatcgtgaaggaccgcgataaagtcattcgtccggatgaggtgaccaacgtcaactcgtttgttggtattccatcttggtctgaatggggcgtggaattccagtgtctgtttgagccatcgattcgcgtggctggaggcgtggcggtcgaatcgctcatgaacccaagcgtcaatggtaactatgtgattactgctctggaatacgatttggccagtcgtgatcggccgttctatatcaaagtcatggggagtccagcggcataatggccagagaaatcaaatcattcaacatgttcggagtccactatacttcgcggcaattctctgctgtcgatgggctcagcatgatgtcggaaattcagagcgtgccgccagaagaattgctcaagtgcaccgatgtattggcgcatccggaagaccatccggaaggcatctggcttccattgactgctgcgaacatcaatctttatgtcgttgatcgagcgaaagtaatagctcccgtacaagttcttgcacttctgtccgaagtggtaatcgactggaactttggttttctcaaagactggaccggagtcaagattccatccagatttgtcgaagatatcaaaagcgtgaagacggcacattcaccttctgtagttgcgagcttggtcgcgaacggctcagcctctatgcgcgagttggaagagtattattcgactcaagatgcgttcaagatgatagacatcatgacggcgaagagcgtgaacgaggccttggcgtccgaagcatcgcacaacagaatcaaaaagggataattcctaaccgggcctgggaaggctatactagacctgccaaatcagaggctttcccatgtccaatatttctctaacatccgcaaaagctcccgacaggacgcgactgatcgccgctcttgacgctcggtcgcggcgggatgctctagatttcgaagtaatgataccggctcaggttgttcaatatgacagggccgagaatatcgcgacgattcaacctctcatcacctgggttgacacggaacacaacgccgtccaaaggcatcagctggttgatattcctgtaatttccatgggggctggcggcttccacataagtttcccgattcagcaaggtgacataggctggatttatgcggccgaccgcgacacgtctcagttcctggagtcgttgtcaatgtcgaagccgaacaccggccgcatccataagttcgagcatggcctgttcatcccggacgtattccgtcgatacaccatcaattccgaagattcggccgctatggtcatacaatcgacttccggagcgaccagaatttcgattcgcggcgacaacatcaagatcactgcgccgtcgaatgtcaccgtggatactccgcaggcgaatttcactggaagtgtgactatcgccaacaccctggttgtaaacggcgtcaacgtgaacaaccacggccacctcgaaaacaacccgcctgatgcccggacgaaaggcggcatgattgcttaaggagattttcatggcaagttttgatttttctgatttaacagcgggggggggttgtaatggctaactacaactacatcgtcgatactggtgtgatagtcgcagataccgccgacgttctgagcgacgttgaggccgagttccgcgccgccctcggtgccaatatcaacttggccgcgagcactccgcagggatcgcttgtcgcggccgaggccatcgcccgttccagtgtcatgcggaatgaagcgcgaattgccaataccataaacccgaacgtttcattcggaacgttcctggacgcgatctgtgccttgatggggatcgagcgcggttctgatctgtcaaccttcggctatggagttcaagtcaccggccgcagccaaacccgcatttccaccgggtctagggtccagactccggccggcgcgatcttcacagtgatgagcgatgtcacgatccctgctggtggtgtcgcgaccatcgatatcaaatcgcaggagtatggcaacattcctctgccggtcgggaatctaatcatcatcgacggaacaattggatggtccggagcaaaagtcatcacctccactcgcgtcgatccgggcagccgccaaatgagtgatgcagagttgaagaatgcccgcgttaatcgattggccatccaaggccgcaactcgactatggccatcaaggcgtatgtgagcgccgttccaaacgtcacgtcggtgaacgtaatcgagaacaacaccggcgccgttcaagtggtgaatggagtctcgtttacccttccgtatgctgtttgggtctgcgtcgccggaaacccggataaacaagcagtcgccgatgcgttgtgggccgcccataacggcggaactccatgggactatggtgcgacgaacaacggcgtcccggtggacggtccgaatggcgttcctgtgcgcgatccggcgtccggtcgaaagtatgtcgtgaagtggaccactccaattatgtacgatggatatgttaacgtaacagtccagcaaggttcctcctctgtagctccggaagccattcagaacgcagtggtcaattacgcccaggggaaagtggaaggggaagaggggctggtggtgggcgcgagcctgtcggcattcgaagtcgccggcgccatcgctcgcgaaattcccggcatctacatcaaactctgccaggtcgcgtgcgtcgcggctggctcgccggctccggctccgggcgatttcacttcggaatacgtcatgagcgcattcggccaggctaccatttccgttggtaacgttcgggtgactttcgtatgactctgcctgcgtacaattcggacatccaacaagctctgaaatggctccataaccaggcgcctggaatcaccggcctgatccagagaaaggcgcaatggtatgacagattcagccgccaattctgggccaactgggagcgcgacgttttcaacttgaagaccgccaacccgttcggccttatggtttggtgcatcatcctcggcacgccttcgaaagggttcggcctttatccaaaaaacagttcttgggcattcggtcggctacgccagaacttcatctatagcggtacacaagtcccgccaccggcagacgcatcgcctggcggcaacttctacggtggcggcaatgccgaaattctcaacttggacgaaatcaggaaagtgcttcagctaagatatgtagcgctgatttcgaacggctcgattgcatatatcaatcgcatgcttcgttacatattcaatgatgatgagccatgggacgaggcgaccggtctgtacttctatctcatggactcaaccggcgagaatggccctgtggagaacttggcagtatatcggaaagattgggaaggtatggtgctgttgtccagttcgcccagaacgaaccacgtgctgacatcgacccctgccagcgacgccgattggccgggagtcgatccggccgcgagcggtattccggtaacggtcgaaacggcgtccgctacggccccggacggctccgctacggtgtgcaagcttactaagccggccgggagtaccgcttacgtctccgcgccgatagatgggccgctggggtccggtagcactgtaacgttctcgttcttcgcgaaagccggctccacccgtttcattgcaattcagtcggctgccgatttccccagtcgagccgatgccgttttcgacctggattccgggaacgtaatcagcgatcagatgctggacagcagcgtggtaagcgcccgaatgattcgtctggaaaatggctggtggcgttgcgttctcacgaccaagaccgtcagctcttcgttccgcgctgcttacgtcgctccggcagaaaccaacttcagctggattgattcgaattccagcgcggcgattgacgtgcttatctggggcgctcagatcgaactgggtgatactccaactggatacttggaaactaccggggcgcccgtaaccatgaccgattatgttttgcagaacgcccagaccggaacagtcaagttcacacagccccttccgaccggagtagaagcgtattggactggagactggaaaggtgggtctgcgaccgagccggccagattcgcagtaggggatgggactcaagatacattcaatctgtccagccctgcatacatcggcctacccactagtggggcgttcaagctagaatacagagttggtccggcgcttaatttgtcgccgcaattgatcaacctcatgaatgaccgggcggtcggtatcatgccgacttgcgccggttgcgatgtaaaagtcattcaggagtaatgacgtgatcacacccgaactgatacccagtccgtttgctgcgcagggcgacaaagacccgatcccgcagacctcttccactggctttgccaaccttcgcgatggctacacgccggactacgaaatcagtctggcgtcgaacaacccgcaggccaaagcggtcgagcggaaaattcaaaaccaactcttcttcatcgcgacccagaacgcacaggcgtggcagcggcaaatggcgccgccgtggtttcagggcatgccgggcggctacgaacagaatgcagaagtcgtgcgcgtcggaaatgacggcataatgcgtcgctatcgttccatggtgaatgccaatgcgagcgaccctcttagcagcacgacttgggaagaacaacccgcctggtcggtgatgcgctccagcatcccgatgccggctggaggcccaggcctatcttctggcggagaagtcatcacgactggccgcaacttcaacgatttgttgaatgggacgtgggagttcttctctgattcagtggttatcgcttctcagaatgcccccgtatatccggcgtccgctggtgccgctgctggcatgttggaggcgaaatcttggatatccgggtccaatacgttctgcgttcaacgctacactgaccgcgtcgggaacgtcgctgtgcgcgggcttaatgccggggcatggaccaactggatgtatgctgtaaacgtcatggccctccaacaaggtcgggtcacctatggagtcgcggccggatcggcgaacgcttacacgttgacgctagttccgcagctccaaggcggcctggtggatggtatgattcttcgggtcaagttcaacaccatgaacaccggcgcctccaccatcaacgtctccggactcggcgccaaagccatcgtcggcgcggccaacttccctctcaccggcggcgaacttggccaaggactcatcgctgagcttgtattcgacgcagcaggcgaccgctggagaatcctcgcaggcgcgccacgcatccaagttggcaacgccgatcaagattaccaggcccccagctggaaacaggtgaaggattacgtcgcgtcccaaaagctgactgaagtggactgggctgacgtcgtcaacaagccgaacgtcgctatccaagacactacgccgtggttcgccaatctggagttgtctgacgctcggcctttcatcgatttccacttcaacaacaaccgcgccaaagacttcgactatcgctttatctctgaagctgatgggtcgatggcgttctactctcgccaggggtccgctggtcctacccaggatatcctgttcagcaggtcgaatgttacattcctccagccgcgactggatgttgcgaaaaacctcgcgtacatcgcgaactctggtcccctttggcagaacaccactgccgatcagcctggttggaaattcaccttcgcacaaggtgtggacgccaacaacaacgcggttatcgcagtcaataccaccaaccctgacggctcttatcgctcgcaggtcatgcgatgggactgggcgtccacgaacgtcatattcaacaaccgtccgctcttcgccggtcaatacaccccttgggattctgggaacttcgatccttccaccaagttgacggtgagtgccacgaaccaaatcgccggcccaaccgggattcggaataccaacggcaacaccggcaacatgaacacctggggttccggctccacgacggcatcctatggcaatgctgccattcaaatcttcggaaaagggggcggtgagcctgccgcgatctatttcgacaactcccagaccggatggtatctgggcatggacaaggatggacagctcaagcgggccggctggtcgctcggcaataactcctatgtgatcaccgacgaatccaacatccgaacccatatcaacacaatggctgcgcgcccgatttgggggaatgtcgagttctggggtccgtggaacttcgatccgaatcttaaactcactttgaacgctttcaatgatagctcatacaccaggatgaccaacagcggcgcgaaagacgttggtatcgcgtccatgacgagttatgctgatgcggccatgtcattcttcaactatgaagcctcgaatccgaccgggccgcgcgcggccgttatttcgttcgtgagaaatggatcgcgtggagtgctattcggcttggattctgacaacaagctgaagtggggcggatattccctaggggccgtcgcgttcgagattgccgactccaacaacctcatgagcctgtggtcatcccacgctgccgcgccgaactggaacgggcagaccatctggaggtcgggaaacttcaacccagacaccaaggcgactttggcagctcgcaatacgacgtcatcccctacaatattcagttatggggcgtccggaatcgcatcaaccggacaggtcggtgcgttggttgtggaaaacaacagcgtcaccaataccgcagccgccatcacgttccattcgccgcagaaatatcaggtcaacttcggcctggatgcggacaacgtggtaaagatcggtggcggcacaatgggcggcgtagcatatcccatcatccactccggcaactacaacaactacatcaaccaggcgctggttcaggtgggtcttggcggagtcggttcctacgcgatccttgccgtatttgacacctccgcgccggcagcgtccattgcccccggaacgatcatggacagttccaagctgttctattcgtcctgcgattcgacctatcgcagcagcgccagtccgacgggcacctggcgctgcatggggtatgtgtataaccgagactccaccaacggcgactcggcatccctattccagcgggtaacgtaacatgaaatggacgcggatcagaaacccacgttggctggacgcggtaaacatccacgccatggttactttcgaggggattggagaagttcctttcaccgccaatccgcacgacgtggaggcccacggaagggccattcactctgcgatcctgtccggggcgcacggacctatcgccccagtagactcgacgcgggagcaggccttgcaggacgctatacgagacagggaaaagcgggctatccttcgcgatacccgatggcccatagatcgtcacgacgagcagaggcggctgggtatcgaaaccacggacgggcctgggctgatagcagcccttgttcactggaggcagcagattcgcgattggaatagcggggatcggccgcgacttcccatggctctgaaaacaatgttcaaaaatcaggagtattgatgaaaatcacgaaggatgttctgatcaccggaaccgggtgcaccacggatcgggcgatcaagtggctggatgatgtacaggcggccatggacaagttccacatcgagtcaccgcgagccatcgcggcctacctcgccaacatcggcgtcgagtccggcggactggtaagtctggtggagaatctcaactacagcgcccaagggttggccaacacctggccgcgccggtacgcagtagacccgcgagtccgcccgtatgtcccgaatgctctggcgaaccgcctggcccgtaacccggttgccatcgccaacaacgtgtacgcggatcgtatgggtaatggctgtgagcaggatggtgacggttggaagtatcgcgggcgcggcctgatccagctgaccgggaagtcgaactattcactgttcgccgaagcctccggcatggacgttctggagaagccggagcttctggaaactccggccggcgcgtcgatgtcttcggcctggttcttctggcgcaatcgctgcatccccatggcggagtctaacaacttctccatggtcgttaaaaccatcaatggcgccgcgccgaacgatgcgaaccacggccagctccggatcaaccgctacctgaagaccatcgccgcgatcaatcaaggctcctgacattcgcccaaagaaaaggccgcttattcagcggcctttttgctttctggctttgcctcttcaaccatcttgacctcgaccggcgcggcggactcctcctgagttaccgaatccacatagttccctagtgaactcagaacgccgattaacagcgctcttactaccttgtccttgactgtctcgcctatgatcttggtcagaacggatatcaactcttcccggagtcttgggctgattcttggccgaaagcgcttgcgatgctctttgcgtttcatgtttagtcctctgtctgcggtcttctcctcaccccgataatggcttggggatgcgctgtgttagtcggaagggtcgggcgttattataactcgacgaaaatgctcgcgcttaactgtttaacgatacgcaccgcgatattaaatcgccttctttctggccaaggaactctggcggccgggtccggtctaaggcttaatttgtcgacattaaaacgagaaaacccggatcgcctgtaggataaggcgtccgggtttatctcgatctagtgtacgctagaatcagtggcttccgccccatccgtccagccagcaatcgaagacggcgtgtcgcggcttgtccttggcgccatgagagaaatgcttgaatcggatgacctggcccttgatggactcccggtcgttccagaaacgacgtttctcgtcgtgggtcaggctggaggccgacacgttgaaggtgacgccaggccacagacgttcgttgcggcagacgaatgcgccgaccagcccggatggcgacaggttttccgcatggctggagcgagccgtgcgacccagttcattggtgaaagattcattattgttgtgcatcagctcttctacgtcgatgatctcagcttcgtcgtagtcgtagcgcttgactttcacacagtacccttccttggccgtcgagcgaccgaacttatacaggccgtctgcacgcttgcccatggaaccttcgaatcccagctcggtgtggcggcgctcgacttcggtgaactgctcgatggaagttaccagctcctgctcgaccaggtgaattctctcacagccgatgcagttgcgcaggaagttcacgcgctcggccgccctggacaggcgctcttcggtcggtgcgcgatgatcggtgaaatcgtcgaacacgtggaaggaccagtccggttcaccactgtggcggcgaagatcgccagacgatttctggaagactttcgggtcgctgatgtcgccgcacaccagctcgccgtccaagccgttgaacaatttatcactgagatattcatagatcgactggttagtctgccgctttaggcttcgagtcaaagcctccccttcgaatgtgaaacagcgaaatccatcgatcttcggtgagaaatacatcggcatctggctttccaacagcttcgggtcaaaattcgatgcgagcatgggtttcatacagttctccagaaaagaagcccggcgaaccgggctaaatggcggtaagccggctcagatggtttcgttggcgtggttcagttcggccatgatcgacgcatagcgctcgtccgactccttgatgaacacgccgtcgtacatgacgcctttgcgatccttgatggtgtcgtaggccgcagcgtagcaggcgagcatggtagtgtcgtgctcttccgtcacatcgaacagagtcatgacggccaagaccaggctcttgatggctaatccatgatttccgcgtgccagcgcgccggccagatgtccgaggtgctgcaaatcgtcgccgtaggtgggatgaacttcgacagtcccgctgaagaccgatagatgatcgaacagattttcaccgagttgcgcggccatgatcgtggcaaccaccattacgtcgccgatgccgtctttcacctcgactggtttgttataaacccaggcttcgcaaacttctgcgaattcttcgaccaacttcaggaattgatccttggccgaagagcctttgatcaggttccggtcggaaccccatttaacaaccaagtcgtgaagttcgcgactcatgatttgttcgatattcattctttcgattccttttggatttgggatttgactgcgttgattatggacgccgtgctctggcgcgatccatccttggtggtgccgaagtagaaggccatgaccgacttcagctcggcgaaccaatatccgatgatggtgccgatggcgaccgaggatgtcgggtccatcaaagcctcgcggccgaatgtgaagattgcgatgatgatgagaatggagcctgtcagaagagcgaatgtaatagccgggcgaacgaaatcgttctgctgcgcggcaagcctcctcgccgaatccctgtcggccgcctctgcggcgaactggctaagctcagcctggagctggttctgctcagactgaaggcggttttgttcggcttgaatcgcaagctcctggagacgaacgcgctcggcgctctggagttcggcgaggcgcgctagagcttccggattcgcgtctagagcgctcgcgaccgaggctgggtcggccttcgaccccagcgccgtcgcgacgatagcgcccacggcggcgcctgcaggcccacccaggagcgacccaagagccggggcggccgcgccgatcttactacctatgtccttccagtccattttcgactcctcagaagaaaggcgccattacagcgcctttctccggccggtgatttttagaactcttcggcttcggtcgcatcgccgacgccaccggcgtcactgcgaggctgttcctgcttgctgtagtccaccttcacctcgccgccgacgaacgacttgtacaggtcggccgcagccttgaagtgatccgggttcttcaccaggccttccagctcgaactggacgccggaccagctccccttgtcgttcgacatgccgacggtggtcatgcggaccaggttggcgaaagtcggcggggtgcgcaggccctgcggggtctgaacctttttctgggacagcgcggtcatgagctttttcgaggccttgatctgcgaagacgacagggagatcagagcctggccgaaatcgccggtgtccggatcgatgacgatgacgtaatgaccacgggtgtcggcgaagtagtcagacttcttgtcgctgaccgaaccgtcttcgttcggcgcgtacaggcgcccttcgacttccttcaccttggtcgggtctttcatcatttccttgaagtcttcgacgctgatggcacccttgaaaccgccctcggcctcgcgaccggcccagcggatgaactcgcggcggtacgcggccggaatgatcagcaggccggtcttgccgtcgtaaatcttgccggtgacggtgttcaggaacatgccggccttcgcgccttcgatgtacttcgggtcatcttcatcgacctggggagacatcttctgcagaacctggatgaaggggatggcataggactcggcatcggcgccttcgaagcctgcgccgtcatacgatcccaaatccatgaagtcgggaacttcggtagttgcgacggcgccgccaccggtggcaactgctacggccttggtttcttcggttgcttcggaagtttcggttttcttaccagccatgttaggctccttgtttgtcgaatttcagttatcgctaactgtgggtttataataacggaagttgcaactaagtaaagcaaattacatattaagatttgctctttttcaccttcggtttcgtgatcttggcctctttgtattcgtgcacgccgatgaaatctggcagctcttcgcccttctccaggtactcgcgaccgaacgcctggagggtctggtaatggacatcgcggttgatggtggcgtcatagccggcttcgatgatggcctcggccgccttcttcgcatcttccatttcgccgcgaccgaattcggccagaaccttggtcttgatgatgccgtcgttgtcggtttcttccagccacttccagaacttcgatttgttctcttccttgacggaaatgatggccttcggctctacttttaccgtgcgaccgtccgccagagtagtggtcttctgaccaagctcctccaacagctccggaatggtgttacgcttgagggtcttcagctcctcttccttttcggccagcgccttttgaagatcgaggatttcgccgtccagctgcgaagccttgtccaccaggttcagcagtcgatggccgatgtcggtggcttcaaccgccatttcatccatgacgccaaaatagtcgatttcgcccggcgcgttctctttcaagtattccgggatttcaagctcttgctctttcatgtccgcctccaacttagtgatgttcccttacttgaaccaagtattgagtagatattatgccgcatcttccttgatacggctactgatttacatattaaatttcgtcgcgagtgctaacgtcagcctcaaacacgccatcaacgacataacttgcaaggttgcgtttccactccaagctgacctggattttctcgtcgatggaatccagacagatcaggtcgaagtacagaaccgagttgacggtgccgattcgatgatttcggtcttcggactgcatccgcagctcgttgtcttcgtcggtcgtgtagtagatggccacgtctgcgactgtgagcgtgatcccgatccctgctgcggccgggttgcccaggaacacctggacgcgcttggcctggaaatcgtcgatcaatttttcccgctcggcctctttggtctcgccgtagtaggtgccaaacgaaatcccttgggcctccaaatacgccttgatctggtcgatttcctgaatgcgcatggcccagatgatgatggagcgctccgggtcttcctccagcagaccctccagaagatcagtaaacacggcgaatcgcgggttgtcttcgggcggcaggatcaccggctcaccatagacgttgatatagccggacgcaacttgcttgagcttcgaacgcgctgccgcagcatcgaaagatacgtccagcatgaagtcttcgttcttgagaacgaagtggtagtcttcttccacgcgctggtaaacctttcgctgctccggcgacatttcgaagtatatgcgcttgtacactttgtccggcaggaatgggagtgcttccttcttcgtgacccggaaactgtgcggctcgatcagggaccgaagcttgtccaggttccggaataccgggcgcccacactcgtctttttcgaccagttgcggcggcatggtctgcttcccttccagcttgcgcatgatagctatcattcgaggatcgtcactgggcaccaagacggaaaattcggccacaaacgcccgataggatttcgtccccagaattccattgcgcaagaattggaattgcatgaacaaatcggtcggtgcccgcgtcagaggagttccggaaaggatgcgacgggccacggccttctcgcccagctttacgatctttttcgcacgcttggcttgtgggtttttgatcctcgttgactcgtccacaattgcgcaaactttgaatgtatcaaggaatcgctcgacctcatcatagccagcctggtggttgattgcgtcaacgtttatggcgaagacgcgaagaactttttcatctgcgaacgtctcggcatacagacgatccaagcgcgctctggcctttttggaagtcggtcggccgcgccaatccacgctcaaagtcttgatcgcgacgtgggtgggaatctcgcgcagaatccagttggtgtggacgcctttgggggcgacgatgagcagcgcgtccacgcgcccctgtaggaagaggcgaacggcatcggccaaagtcgtccaagtcttcccggtgccctgctccatcaggtatgcgaaattccgtttgttcagggacgcggccagggcattgaactggtgctgcatggcctcggtcttcatgcccttgacgggatatgttttggctttcatttgttctccaaatcggcgaggaactgaacaatgttatccagtccttctgcatagctcgcaacttccaccaagtcgcggctgttaagctcgaacaaatcgagcatgggattcagcagcagccaatcggtcccgatcttggccaggacgaagccacggccgccccagccgatccgttcccgaaggaaagggatttgcccaggctcgaaacatctggccattgggcaggtggaggcgcgtttcggccactcctccaacgccttgaactcgacccagaactggacacctcgacgattcaggcaaatcgaatcggacataccagaccgccgcgtctccagaaagtcgatcaggattcggccgagtgagcgttgcttaaacgcattcgccgctttcgtttcgcgatcattcatcgccttcgccctctttggaaactttctctgcttgcgctgccagctttgctttttcgcgttcggtcaaaatcctcttgacggccttcacgatgaacatatcgattccgctgagcttccagcctttgatgaggaaccaagagcctgtcggcgttccttcagcaatctgctttccgtattgcagatatttttcaggcctaattctgaaacgtatcggctgatcaaccgagtcgtcaacacacatgatgtcgagaaactgcgactggcccttgtacaccgggtttttcccttgatctgccctcttcttctggcgaatcggttcgttctcatcagacagaacttttttcaccatcttgacaatgaccaggccatcgtctccatcgcggatatcccgaatgttctggatggggtttccggaagttactccaaccagctccggattgtcataagcatgaccccagagcgtgtgagcttcgttcaaatctgcgaattgaacttcagaattcgacaaactcgcggcgactttttcccagtcctgaagcgtcttcagatggggaccggccagctctttatattgagctttcagctccttaagatcggcctttaactccttcagatcggccttcaacagtttctccagctctttgtctcggctgattttagccgaaagaatctgggattccagcgatgctacatcagcagccttgtcctcaacatcctgtgccgatatcgggcaattggccagggcgatcctcgcggccttgacttcctcacgaagacgcaggaaccgctcggccttcgccgggccgaagcctttggcgttcatgatgccgccgatcaggcgcccgtccgccaccacccagttgagttcggaatgctccgggtccagggccgtatattctacgccttctttggccaattcgcgaaggatagacacagtttgctggtcgtccttcgccgcccgaaggcacgcggccgcgtattccaggcgatgataccgcttcatgtagcaagtccagtatgtcaccacggcatagcttaccgagtgggagcggttgaatccccaggcgccgaatgtcaccatttcctgccaaactcggtgagcgtcttccggggcgacgcctatggtcttggcgccctcgatgaacaattctcggcgcttgttgaagaactcttcgcccttccgcgccgacatcgctttccggatcgccgacgtttgttcccagtcgaactgaccaatgtccttaacaattgacatgatctgttcttggtacaggaacacgccatacgtccccgacaaatactgctcgacctgcggaatggtataggtcacaggctcgcggccggccacgcgctcgatatacttggttgccataccagaagacaacggacccggacgggcgagcgccgtgatgtggtcgatgttctcgaacgcggtgatgttgatcgcattggcgaccgagcggacggcctggccttcgaactggaagatgccggacatcttgtcttcgttgagaatgtccagaaccgccttgtcgttcaacggcaagtcgtacagctcttgcgccgtcacgcaattagcatcttggatgacgcccagagttcgaagcccgagcgcatcgatcttgagaagattcagatattctgaatcgggcttgtcgagctgcgcgacaccttcagaagttaccgtgcagaagtcgatcacttcatcgttgcagaccaggatgcctgccgcgtggacgccggagtgggatgggtggatttcgaggtcgcccatgcaggcggacgcaatctcatacttttcacggaagtcgcggccgggctgagttttttcgaaagtatcctccaatccttttccatatcgttcgtccgccgatgtatattcgatgatcgagtttttgatgttgtcggtgtcgtggaatggaatgccgaagcgttttccgacgtgagcgataaccgacgcggccttgagtgtgttgatgttcccaagctttaccacgttccaagtgccgtatttctgctggagatattcgaacactaaatagcgatgggtatcggcaaagtcgatatctatatcgggaagatcggaacgggaaatgtcgataaagcgctggaagagaaggcgatgcgggagcgggtcaacctcggtaatgcccaggaggtagcagaccaaagagccggctgaagagccgcgagccgggccgaccagcatatgcttcttggcgaacgcaaccagatcggcgaccaccagaaagtagctgtcgaaatctttcagctgaatctgcttgatctcttcttggaatcgatcctcatactcctgggtccattccttgatgtggccgcgactgaggcggtaggcttgcccctcgcgagccagagcgacgatatcaccatccaagtggatcatcggcgccttcgccagtttcacatccgccaaccgctcgactaccgcacgagtattggctgcggcagtatcgaactcttcgcgagtcatgatgtggcgtaaacggctccacagctcctcttcggtggcgatgtggcgaaggccgaccgactcccgcaccttccaggccgacgcgaaatcagcatggtcgatggacggcatgtcgttgtaagaggtaatcaccaccggctttccgaatgctctggacgtctccatagcaccgtgcgcggcgaccatcgacgcgggattgatgtcaatgtagtcgattccggccagatccaaatgggcatacgcctcgccagcgaatttgatgacaccgtcagcttcctggaattcttgcggagtcaatccttgattctggaccgacttggaagtcaagcggtagaacttctttgtgtccttggcgagcacccaggctttgagcttcagctctttctcgccatcgtcggcgcatttgatcgggatttccatgccgaatccgcgaggcagttctgccttggtagcggcttgttcccaacggacgtggccccatgttccatcatcgacgatggcgacgaatggggattcgatctctttggcgcgctcgatgatctccgggaatcgaccatatgcggcgccgtaggagtaaccagagcgaacgcggagctgagggaaagacatcatgcggcctccattgcttgatatgcccgatacactcccatgcgcttgcagacttcgtggagcagccgcacgtcgtcgagcgcccggtgtttctgtacatatgggccgcagtagtgctcataaagatgttgcagccgcatgcggtggccgaacaacggcgccgattcttccacagtacagatatcgagcgatgggaaattgacttcgtccaggccgaacttgccgcgagccagatcgcaggtcagcatgaacttatcgaatggcaggttgtgggcaatattcgcgtcggctctggaaaagaagtcgcgaactttctggcgctgatcgaggaaagatgggtgcttgaccaggtcttcgttcttcaacccggtgatcttggtgatgatttcctcgataacgattccaggattgcagatgaactctacttcatccaaaatcttttcgccatcagttatcacgccggcgaattcgatgattctcggctgctttctcagactcaccctttggtggaacgggagtcctgtggtctcagtatcccatacagcgaatatcatgtttgttccctcttatgtcgaaaggccggctgctttcgcgaccggcctgaggagtataccgcgacggctgaagatttacgccttctgtccgtctttcggcgtgatgcggccggagcgcatggtggcgtgaacaaacgccgaatagttgatcgagtccaaggccgaatcggcatccttgaacccgctattcgccaggcgagtgagtttacccaccatgtgcatcacgaacagggcgagtcgatgatcatcggcggtcttcgccaccaggccgttcgggaagaggatttccatgatctttccgtacatcagatcattgcgaccataggtgctctggcgggcgcggaagacttctgctgcggcgtacagattgttgagaacatcttccgcgaaatcatctggatgggaatcatcttcgcccggccagacggattccatggcgaacggcgcggcgtcttcggtcgggtcttcggactgagccgtttcagcgagcggagacggggctttcgcaaacgcctcgtcgagggtaggggcggagttcggggcggccgggaacggctcgcctgccatgtcgttgggcgcgctatcggggtcgctatcggccgcgacggcgaagaacggcgcatcgcaaccttccaggttcaggatgtaggagtcgatccccaggctattgtaggcatcgatgatgtcctggcgatcatcgaacgccgcgacgatcttggtgacgccttcgattttcttcagtatgtcgagcgcgactgcccgcttgaactgaggcgccggctcggtgttaccatacggccgcatgatgagttcatactcgcgatgttcggcgatgccgagttcgcggtggagcttggccctggtctggaaaaagtggttgtcggttcggccggtgacgaagaaaatcatgaggtcggcgtcgatggcattcctgatgcgacctacagcgtgcgggttgagagtgtccttgtcgagacgagaatgatactcgtcccattgccgttccaaggcgaagctcttgcggtggctatcgtcgaatacgcagccgtccaggtcgaagatgatgatgccattctttggtttgcgttccatattcagatttccttactggttgctttctgggtgacggttttatcgatgaacgtcccatcagaagtgaggcggaaaacttcgccattctggatgaaatcgaacgattgcacgttcatcgtgatgcgaatggattcgctgccgttggtcacttcgacttgtgcgatgtcgccaactttctcgacaatgatcttcatgttacatggacttcccattgacggccacagggttggcctcttgtttttccgatccccagaaatcgcggcgcagttcttcctgctcggccgagcgatccatccaggggcgatagaacttgcactggtagataggttccaacggcacatcaatcacaggaatctgacctggctttgtctccagagcggccatgaaccggtcataagatttctgctggatttcctcttcattcatcaccttcgacccatagcgcgggaaggcgcaggagccggtggcgacgcagtgcggctggagcaggctgtcgaacataggatagacttccagaaccagccggcgcatttcgcggaatacttcctgatattcaccctgggtccgaacgcacaggcgaaccttcgccatgtcgctgagagtccgcagattgaacttggccgcgatcttcgtttccatgttggaagggatgatggcacgagcgtcctggagcgacgcgccggcctccagaagcttctggtagctggtttgcgcgtcggcaatggcgtcatgccacagacggttcagctcttcgcggacatggtaggtcgggtcaggctcgccatttaccgtagccggttcgtcgaattcccagcggaaggcttccggctgaacgacggcgctgatttccagagcgcgactggtttcctgctggtaagccccggtacgagtccgaacgagttgatgggtgaagttcttgctgacaccctcgatctggaaaatgaagtccacgaactcgaacggcgagcggatggtgtccagcatgtacttccagtggtcaagcttttcggcctcggtcatggtcgccgggtcttggccgcgcatgcgagtggatttcgtccccaggagaagttcccaggcgttctgggtgtaactgatcagagaaattttcatcagaaatcttccggaattggcgtgaagtggaattttttggttagagccagggccaggccttgggcttgctctttacgaaggccatactgctctatctcttccttgagcagttcgcaggcctccagacgcgactcatactcttcagcctcctgaacggatgagaaaacggttccatcagaggttctgtacacaagttcaatcgacatgatgacctcagtagcagcggatgatttcggcgcggatatctcgacggtcgaggtagtgctcacgaatcttatcgcgggcgcgctcggcctcttctcgactgccgaacgacaggttgaacgaagtgaaaggcttatcgtccaggcgcccatcgccaatcaggtacaggatgcctaccagcacgaaagacggcgctgtctgtcgcgtttgcggcgggtcgatttgcatttcgaggaaagacatgggaacctcttcaggatgatctggtgcgtacattaatagcgctcctgctgagcagctacggtttccggctcatagatgagcatgtcaacgatttccgggcactggcctttcacccagtcgatggccgcgaccagtgtggtggaagcggagaaagagaaagtgcggtaagactcatggatgtacggcgaccccatcgaatcgcgctcggtcgtgcgagaaatgactgctttgatattaacgatccggcccatcttcggcctccactttagcgattatatctgacaggctcagcttctcgccattcaggaaataactggcgcgaaacttcctgtcaccctctggcccgacgatccgggccgttatggtgagactcccgccgccaagggcatcggtgtccctgaagaaagccagcagcgcccgcttgagcgctgcctcgcgaggatcgacggccattaacctaccacgttccagccgtgctgagcgcaccaaaccgcaccggcccctgcaggaaggctattcagaaggaacacaggagtcaggcgaccgtcctcggtcatatgtatgaagtagcgggcgccttcaccgagccattcggccttggcgatagcgcgttcgagattggccttggtggcgtaggttttggtgtggttcttgtcggtggagaaggttacttcgcgggccatttgtcgattccttttggttgaagggtttcgcgtttcgatgagggaatattacgcccacctgatccagaagtaaagcacttttgtaaattacttcacgaacattttcttggccttctgataagacgaagaagtcatcaggcgctcgatgacgtccatgtccgaaaccagatcatccagaaggacattgcgccaggtagcgaaccggccgagcgagaagatgccagcctcatgggtgagattccagatcatggattcgcgctcgtcgcgaccgagcggaatgattttgcctttggtctggatggtcggctcgccatcttcgatgagctgtttccttctgatgccgaaggccgcgcagacttcatccagatcccaggccggattccattcgatctttttgatctcaccatctgcattctccacgacaccattcgcgatggattccacgatcaaggtatcgccggtgatggacgcacgaaatgttccgaaatcgggactggggaaatacacggtctggaagacgtcacaagggatggaaagcttgtatcgactcacgatgatggaagtgcctttaccgaaggacgggtcgattcccaggtccagtcctgccgcagccaggttggcgcggaatggcgcggtgctgatgacattcacatggtcatcttgccggcgaatatactggaagaaagaggcatcgaaaggacggctccaggtgatacggttcgcgagcttagccaccagctgctcatagtagtcggccggtgcgatccaacgcttttcagtcgccagattccagatggaccggtccgacaggcctcctgttactttccgggagtacaggttgcagtagtcgatgcgcggctgggaaatcagctcgtcatccatgtagatggccttgtgtacagtgacttcgcggaacgggatgccggtgagttggccaatcactggcgagcggaatcgcagaagtgcgttgtggcgctccttgttctccggcgtcgccgcgtcgatgatttgggcttgaggaaagcgatgcgcggcgatcagtccggcgagtccggcacctacgatgattactttctgatcaggaatcatgatgtgtcccttatgagtgtacaaaacttgagaggataaaaaagggacccattttcatgagtcccttgaagagctagacgattcaggctcagaggagcggcggcttactcctcctcaccttcggaaccatcggcgccctgatcttcaccgccgtgctcctggccttcgtcatcggccttctcgtcatcgccctggccagcttcgtcttccttcgaagcgatggcaaccagatcgacccagcccatgatttccagcttgctcaggtagctgcggaccgaggtgccatagagaagatgggccaccttatcgccgaaggattcgatttcgaccggctcaccaacggtgcagtgctcgttgatgtatgcgaacaccttgccgcgagtcgagaaggcctgcggagtgccatggccgtcgccggtcgggatgaagtgagtggcgcgggggcgacgcgagccgttggacttcaggtcttcgcggcgggcttcggccttcttgcggcgctcttcctgctcttccttgcggcgctgcttctcggcttcgctctcagccttcttctgctcggccaggcgcttgcgctcttcttcgcgagctactttctgagcttcctgggcggccttcttctcttcggcctttttggcgcgctcggcttccttctcggccttcttctgctcgcgctcggcttccttcgccttcgccttctcggcctgctcggcttccttcgccttggccttttcagcgcgctcggcttccttggctgcggccttttccttcgccttctcggcgcgctcggcttctttcttctcgcgctcggccttacgcttctcttcgcgctcggctttcttctgttcggcttccttggccttggcctcggccttctcggcgcgctcgcgctctttacgttggcgctcagcggccttctcggccttgcgcagggcggctgcttgttccttggtcagctcttcgccttgggtctgctcgttctggtctttctgttccatgttcttactccgggaatgtttaaatggatggcttattggcctgtgagaggattatctctaaactaattgaagaagggaatacctttcgcctgaacttctctaaatatttttctttcgggaaagtccagactccagggaacttatttatgttagcgaagtttttaactcttacgcaaaaacaacaagtattcaattgcgcgagttatgccagtatacatcaactggctgtaaggaattgaaggcaagttttcttccaacattgcgacccgcttccattccgatccctgcgacttgtggaacgtcatcgcccagccgaagtcgaatccgccaatggccttctgtgcctccagccgcacatcttcctcaaccgaaaagctaagaggattgaacttcacccagcgctcatagttcgtgccgataatgcgaactttggcaaacagcatttcatcaggctcgtcatcatcttcttgcccttcaggaactggcttgaagtccagcagaatggcttgttcgccgttcatgattccatattcgtgctggttcccagtgcataccagcttctcaccgattcctggctgcacgcctttgtagccgaggattcgccgagcgcgcgcgttcaagcgacgacgagtattgttgtaagcacaaagaatcacgccatcgtcgtccaggaacgtccgcatttcatcatccgacatatcgaagccggcccggaccaatatgtcgtcatactcgcggcatggcaagcgcttgccctggcgaacaaacatcgacgcccgaacgatattgccggcgttgcgctcgatttcggtcatgatggtatcacaactgttctcgtggaagatctggacgccgcgcacaggaggaacttggccaaagtcaccaatctccagaaccggaattcgatgcgacaacaggcgctcttcatcccactcgccgatcatagacgactcgtctagcactaccaacttcggcttctcgtcgagcgagtctttgttggcaaacatgatttcgccgtcttcatcttcaccgatgggtcgatagataaagctgtgaagagtccgggcatttgtgcagcctttctcacgaagacgcgctgctgcttttccggtcggtgcgatgaagactgtccagtccatcgagcagcaaagctcagcaatgatcttcgcaatggaagtcttaccagttccggcaaaaccggcgagtcgatagacctggcggcggtgcgctcgatcacaccaaccacgataccagttaacgacggaattaatagcgtcgatctgctggccattgggtcgaaagccgaatcgctcttcgatctgatcgacggtgaagttagatgctgacatatttgcgttctccaacgctaggtttaattgaatttaggctcagtttaagcaagccgtccacagaccagccagtatcacgacgatatttgcggccgtgcggatcgacatagaagtttttcgtgcgccgcaacagaacataatgccaagcggcgccgagtgcgtggacccttcctttataagggaaggccttcacctggtctgcggccttcttcgccccagggagccagcggacggtcgaaaggaccaagaccgcacccttgacagcctgggaagcggcgcggccgtcctgtgggctatagcgatgtctatcggggtctacccagtggtggttgccgcgccggagcttcaccgtccgggaccggccctcaaacaccacagtaccttcgtgagtaaaaatatgttccgccatggaatgttccttataacgtacagttctgctttacctctgcgcaagaagagtatactatcagctgactcgtcaaagcgagctaatttaatccgactttacttcggcaggaaagtggccgatactagcgccgccgcctgtactgccctccaaaacagaggatacattaaatgcaagaatgcaagatttcccgcgaccaactcccggtcggcaatccgaatcccaatgtcgataagactcgcgacccgaacctaaagcccggctacctgcgtcgcagtcgcgagctggacccggctctggccgttcgcattcgtcgcgagctgatccacgccgaagcgtccgacttggccaaggccggatgggtcaattcacagtccagcctctatggatcgaaagccttcccgcgccattccgtcgttcgcgttaccggagttccggaagatggagctttcatcggcatgctgatcggcttcatcgagcaccgcgagcatggcgaatgggcggtcatggaagccggaacgaaagaaggcggcgccgtcatcatcccggtcgatcacatcatgcgagcgtcattcgccgaagccgaagagttctctgaaaagtgggagcggaaccttggatggcgtctcctgcgccagctccgcgagtgcggcgccctggccgggactgaagacgagttcctgcggcggatcatcaatcgatacgttcgtgatcgcacgatcctcgatcaccacaaagtcggcgcggacaaaacctacactgatgcagttctcaaaagcatcggcgaaacatggccgaaaattccttcggggaaattcgtcggacaccgagtcgcgcagctcctgatcggccacaagctaggtcgagcggggaccattctgaatgacctggtggacttcctggagaagttcgcggccgggcgcgataaagttctcaacatcgccatctgtaattgaggtgaatgatatggaagatttgggaaagctgagtccaaagctgagtcctcggcagcatgccgttctactggaaatgtacaggcatcctgagcatccagttcacagatcgccaacgaatttgactcttaaggctttgagacgaaaggggcttgtcgagctatcatggaaggattccgtggctggatatatgttcggtcgccaaccttgctggaacataactgatgccggcagaaggcgaatcctgggagtgctggggaataatatggaaaaagaacaaagcgaaaatcgcccaagcatccctgagtttgagaagaccgacgccaacaaactctatgatgctctggagacgatttcgctgctggagaagaagttggacgaatccgaaaagcgcgggagcgagctggccgcgagctattgtgacggcgtagtcggcgatgaatacggccatccttattgtcgttataaagtggaacgcgacgccgccttggccgaagtcgagcgcctgcgagaatcaaaaggcgatccctctggcagcttcgacaggtgtatgaagatgatgtacgagcgcgacgagaatgcaaaacgactcgacgccgccttggccagggtcgcggagctggaagggaagttgacggactgggtacgcgaaggattccgactcaacgaagcgctgacggtcgccaagtctcggtacggcgcgccagagggttatgccctgatcccggttcgcgagacggaagcgatgcatgatgccgtaatggcgctactgtacaatggcgtcgcccgcgctgatacgcagaagctgctggacgcttacatcaacgccgcgactaacaaggagtctgtgtaatggaaccgaagaaaccttcaccagtagatggagtcatcatgaccagcctcgacgttctcaggaaggcaaagcccgaagcgcaggacgagtgcgccgtgtccatgttcgcaacggcgatccgccagaaactgcagcgctcccgcgataaaggccgaggcggctggatcgactgcgacgaagatgttctgatcaacggattcgccgaacatgcgctgaaaggcaatgagaacaacctcctggacctggcgacgttcctgatgttcatgtgggcgcgcggcatcgatgatgcgaagattcccccggcgctcgaaaaggcgcgacagcacaagatcatggaagcctggagtcgaatccatgaagatggcctaaactccgccagaaaggcgagtgctgcgcgacaattcgtggaagtgcctcgacgcaaggggcgcccggagcgacttgcatgaagcctcacgaaataagactggctcaggccgaagaattcctgagagaactcggcagagggattccggacgacgaacgggtgatggtcggctacgctgaagaggccacagtccaaaccgacgagaacggtcgcaagctcaacgcaggctggtggcctgtgccctggaaggaagggaaatacatcaactccagatccaacgcctacgcctgtatctcgtcgtccatcaagacgccaaacccgaagactggccagatgcgatactggcgcggcgaggcctctttcggccacggactggcgttaatggtcgatgacatcggctccggcaaagggtccaagggcgacttcgaccgcgacgagttccgcgagcgcctggagccgaccgcgattgtggagacttcgccgaacaactaccagttctggtatttcttcaaagagccgatgtcccacatgctccagttcaaggcattgctctattcgttcgtggaccaggtgctaaagaaaggcggcgacaacaccgtcaaagacgtaagccgttatggtcgcatgccattcggcttcaacaataagcgcgggaaagacggcaacctcaagtatgccgacgaaaacggcaagcccgaattggtgcgcctgtaccacgcagactattccaagcgatactcgccagaggaaatcgcgcaggccttcggcgtccgcatcatcatgccacagatgaagaaggtggaaataaaccgcgacgattgggtttatgaccaggtgtggctaaagtatgccgagcacatctgcacgaaatacaagatgggcgaggcagcgggcggccaagtccaacagaacatgtccggcaaatatcgcatccgctgcccgtggggagacgagcatacaaatggcgatccattcggcgcctactttcgcgggccgatccctggagccgagcacgaatatgtgttcggttgcgggcacgatacttgccgcaaagagcatcgccggacttgggcggccttcacggatgaagtcgtgctaccctatatcgtcgaacaattggaaagaatcaaccgccgtcatatcggtgaggagtagacaatatgcaaaacgatcctggaatcctgattaccgccatcggcttgctgttcctcggccttatcatcttcttcgaaggcctaaagggatggaaaatacaagtcgcaaacttcctcgcgtcgcttctgtgcttcttcttcggcctttctgctttgacgttctggttcgtcgttgcgtttgacgtattttaatcgacgaacggtacagaaattttcggatggggacggaacttattagctatgccggtttaggtaggagataatagccgtccctttcgcctcaatatgtagaggcagtgttatatccgatcatgtaaagcagaaggcggcaaacctaacatgattatcgacgacgataacattcttgatgatgacgaatcggggtccagtgagttcgatctcacacagatagaagatgccggaatggaccctttgatgaccgccgcaagtaaggcggccgatgatgcgattgcgaggaacgagacgcaccgcgcacaaaaggcggcgaggtatgccgaggcttatgcggaaccagatttgaagaagcgagcgcggttactgatgctcgaccaggcctttgatcttccggtcagccggctagtgaaaggaccgttcgacgacttcatcacaaagtacagctcgacttcagacagcaactacctcgcggtctatgatacgttgttctgtaagggcgacggaaccgtcccacacccgcatttcgacgagtttcgcggccggctggtggatcaccgaggtgtggcgttcaacaacaagaccctcgaccccattgacctgatgggcgccctcgcggctgcggccttggacgatccatcgatcaagaagacgattgagacttgctgcgtgtgggcgcgtcgatatcgccgcaactctttgatcgagacgttcgagaagaagataccggagtgggatggcgaagcgcggatcgacacgttactgatcgacttgttcaagccgttcgacaccgagcttaaccggatggtgagcaagtatttctggctgagcttgtactgccgcatcaactaccctggaatttcggcgccgatctcattggcattgattggtgggcaggatgcggggaaatcatatttcggcttgttgatttgtaaggagttgtccggtgggcgcgatctggctccagtccagctcgatctgagccgacacgaccagacgccattcctgcgcaatatcaccggcaactcggtcattgcgaacgtcggggaaatgtccggattcaaaaagggcgatatggaacgcatcaaggagttcttggtgcgatcttcggatacattcgaccagaagtttgagccgggcgaaacgatcaagcgacaatggatcaccatcatggacggcaacggctacgatggactccaacgggacgactctggtaaccgacgtttctatcctatgttcgttgcgcagctgcccgacgaggatggaaagccgaactgggtaaagccaggcgatggcaacgaaccgttcaaggtggacttcaccgacttcggccgcaaattctggcaagcgatggccgagtgccgcgcatggatcgaagagtatggcgtcgatggctacctgaatatggtgtcggaggcaaaccgcgaagtccagaacttctctatttcggaaatggagaatgcgcgcggcgtggttcgcgacgatacgattgatatgtatctgatcaatgttctgatcagttgcgagtttgaagaggttaagcctggtgggaattccaagactcctgggtggcgtgtcaatacggtggaaatcttgaagtggttcgatattctcgccaggaagaagccgatttctcgccatttaactccacacctgaaatcgcttggattcattccgaataagaacggcctgaatggatggctactgcctgccgataaagttgccggtcaggaaatgattgggtccttgccgtcattcaacgatgcgctgatatatatggtcaggaagaatgacgccgccgtctctgatgatgatgccatgtcgcacatccgcagagtcaaggcagagcgagccaagatattgggcgatgatttctagtgtactgatgcagttgtggttggactaggccgccttcgggcggtcttttctttggcgcggagaacattaatttagcttgtgaacggtgaggtttgaaagctatgtgggaattagggtggcgcggcggggtgtattttgggaagttgatagattttcggtattggtctggcgtgtatgatggttggattttgcgtgaaatgttgagaaattgtgggtttgaggcgggtttttgtatggaaatagccgcaaattcctggattgcgattctgactgggaagatgggaggcctactgccgcgcgggtttgcggccgttttcccgaattcccggttttccgagcatgggttaaaactattctacagcgaaaatcgattgcacaatcctaatagaaaaaatctatcacggacgttacctatctttaaaatcaataaaattgatgggaatttggtaatttgttatggttttaggtttgaaagcctcgcggcactaagccggtacactacccgtcgagtttccgattccgctcaactcgcggcagggtcgccggaaacttccggacttccaatccatgggtcgcggcgacaccacggcggactaagcggcaaggaccaaaactcgacgaacggaaccgggaatttgggcgcacgacaaaatagctcagctggacatatttctaacattcgatttaacactcctctcaaacactcaccaccatcgtcgcccaccaaccgccgactcgatcctcacccaccagcggatcgctcgtataacatcctataacaccacctaacactcattcatcatcaaacccacccagacctacagcccacccacaagcagcccatagacgcgatccctggccccatagtacaatcgcgccatactcagtgtcgcgacagagcaccaggccccatccaccaaccgagccaccgcgacgactccagaatcgaactcagggacgcagcaccaaatgaccaaattctacagccccgacgatctagtcacaccacaggaattcgcagacccgcatttcgcggcgatcaaccaaaagcgattcgacctgtacatcgacctgcgcgtccaaggctacagctcctggcgggtcttccgggccatctggggcgaggagcatatggacggtcccgcgcaggcccgcatcttcgcgatggagtccaacccgtactatcgcaagcagttcaaggccaagttgaacgcgaccaaaacgtccgatttgtggaatccaaagacggcgctccacgaactcctccaaatggttcgtgacccaaccgtcaaggactccagccgtctgtcggccatcaaggaattgaacgttctggctgaaatcacgttcgtggacgagtctggcaagaccaggatcggtcgcggtttggccgacttctacgcatcagaagccgaggctcagaccgcgaccgtcgctgctgcggccgaagccaatggctatgttccggaaggcgaagagggcgatttcccgtccccgacgccggaaccgaccgaggaagatcgcgccaaccccatttagacataaaataacatcgttctaggcccgaatcggaccgaactaaggcgacggtagcgggaagggacgaaaaacgattctagggcggttctaggaagtcggagcctaaccctcagaaacgacaaagcccccggactctagctcagaatccgtgggctttcttttgggcgccttattcgccagattcgatgatttcgaagttgtatttgacgccttcgtgctcgaaagtcatcttgccagccgccttcagctgcatgcggaagcggatgtgtttcgaagaaggcaggccgaactcgatgaatgctgcgttggtggaccggaactcgccgcgcttgcctttgacggttacagccacgccatggcgctgggtgcgtttcttggaaacttccgggtctttccaggagttggcgatggctgccgacaggtctttggtctctttggctttctccggcgcgttcttggcctcttcgcgcatcttccggatttcttccagcgcttcctcttcggtgatctcttcttccggcttcagattctcttcttcggccttctcttcttccttcttcttggaagtgcgggttttgtaaaccttggccggggcttcctcttcctggaaggcttcttcctcggccggcagagcattcaggatggcgaggcagcgacgctcagcagtcttgcggtcagagaaacgcttgacagtcgcatcggcgttgtgggcgttgtagaaggcgaccagttctttcatttctgcgttctggatgtcgccgaaggttttgatggagttggtcattttttgcgatcctctgttttggaagatttcgttcgggcttcagtttgtcgccccgttgaaagagattatgcctaggtcgatgctgcgtgtctacatctatttcatcagattgatcacaaagccgacgaacggttgtctgatgtgaaaacaccgcagagcaggctgcggtgtttggtgggcgttggggtgatgtcagaaagtcgggactgtgataggctcgatgggcggatcgccgggcctatcgttgtccgatgcgggcgccgggctggaagggatcgcacccgaccgaagcgccagcgattccgactgccggcttacctgtggtggcggtggagccgctggtgcctttggagggattggaggcaggtcatttcgacccttgaccatttgcagaggttctggaagatcgggcagcgcgccagcgatttcgccatacgtccgcgccggatcgtcgccgaacatttcggcggatcgggcatctttgacgatctggctgatggccgtcacatcgccgcccggttctgccggatcgaagcctgtgaatggagtggtcacgcagcgcatgttcggatgggtcggcagattgttcaggacgatggagtccgcccagacatacgggtttttgtggttgccgggtccgtggctgatgatctcggcaggaatatggccgttcatggtaagccattccgccatcccttgccgagtcagcgggcttaccacgatctgaccagtggactctttggcgatggcgaacagatcaccgaattcgaatccgatgattgtgtagttggacctggactcgccgacgaaagccagggtttcgatgttgtggtggatatcttgttcttcccagatgtaaagcatgatgcgctcctcaataaggctgcttgctgtattcgaccagagacattccggccggaactttgaagcggacgtattcgatcatcatcgccgttcgacgccgattcgtgccagactcgtcattaacgaagagttcgcactgatgcggaatgactcgcgtcaccaggtcttcgcctttcgaaccgtagaacttgatgtaggctgcgacgcctcgcgtcatgctcagatggatcgtttcgcagagtcgctgcgcggccgacgcgctagacagatcggtcggactgaccgtcacccagtaatggccactttgttctttatcggacataaactgccctccaatgagaaagcctctgccgagccgcagaggctggttgttgttagtcgcgcttcaacagaacgactttgtcatatgcgcgatatttaccgcgccagtcttcccagtagtcgccggccgggcaggtaagctccaaggtgatttcgtcgcgccagcattcgacagaaagtacaatagccttgttccttgctgcgccatctgcggcatctgctctgagcttaatcagaatttcgtcgccagttttcagctcatcaactctcacaactttggccatgacacactcctgtttgaagaggcgcggccggaaccaacccagccgcgccgatggattaacgtttgtgaaggatggacacagtgtccacgtcgaggatgctgatggtacggcgacggcgcggattgctgcgctcatgaatgcgaatcaggttcgcaactggagcttcgtccaccacccatacatcttccggcttctgcgtccggagcaggaccgtaacttctgtgttctgggcgaggccgttgcagatgaacgtgaacttggacgagggggttctgtacatttcgagattcctttttggacttcgggtccgacttctcagccggtgaagagattatgcctgatcatcgcagtcgagtaaagcacttgtgtaccaattctccagttaaatggaaccacagcgcggtatcgctgatcgctacgctcccacgccatggcccttcttgcttacatacttcgaaccacaagctgatttccatcctggccaggactcggccgaaggattcgagccgacgccggctggccaggatgtctacattcacccgtcgattaatttcgtaccggcgaccgttgatgacgaagactaggcgtagggtctgtccgtccagacattcccagtatttggtttcataccgaagccagtagcgcttgccagccgggcctaccatggtcatttaatcgatgctcctggccgcgccacgcggtccggtcggcggcgcaggatcgaaccgccccaggatgtagtcgggccggcgcgcttcctgaggacacacggcgagaaggcgccatcctgcgtccagggcatactggagttcgtccgtgcagcagtcttccttgagcaggagacggttgacgctctggagattcggaccagggatagcagagccggtgaccgagttccagccttcgatgccgtgcaccatctgcggttggttgatgtagccttcggacctgccagccaaccggctcgcggccagctccaggcgttccagcattggtcgcagagcagcttccgggtcaacgtcgtcccagagaaggaccaggctgatgatggtgtacggatagtcattgtccagatcccaggccgaagcggtcagacggcccaggccgatttcattacacataacgggaacgtcgttgctccaggtggacgactcccagttccgctcaccagggttcccgattgttacgccttccaggttccccaggagaacgtggagcttgctgacatattccgcctccaaggctttccgctcttcgtcggtctggttgtggcgatagaaggatggagggctgacttttgcatggtagagtttcatggttgttcctcggttttggaagacttgaacgttagagaatggtgtcgcagtatttctcgaaaggactctggcgtttcttctcgcagatcgcgcaggtgattcccaggtcgggtagatcgctgtaagtcttgccgagatacagccagcgcttgcacagactgcgaccgtccgccatgaagaaatggactttgcgagcgttgccgggttgcgcccagccgcttggtgccggcttcctgctcataccatcaccatgtcgatttcgctggcgaagaagttaacgccgactccatctgcgtagccggtgtaacgcagccgaatagtaccatcgatgtgggcttcttcgacgccgatgacttccaggatggtttcgtcgcagtgcagcttgacgaacatcttgatgccggagccaatcgccgcgaaggcgatctgcttgtacaggtcttgcttgatcatgctttgcgctcctgtttgcggatgtattctgccctggcttcggcttcgaacttcgcccaaagcgcgttgtcgactggaccccagggaccggtctgagtcccgtccaccggcgcgaacttgccaccggcgcgacgatacttggacagcgttctcaggctgatgattttctcttcttgggaatcgaattggacgatcacttgacatacttcccgaagtagcaggtgtggaggatttccaggcccttggagatggccttcagcttgattccgaaattcttgatcgcccagtccagatcgtggtgatagaactcgatgatgttgacgatttgaccggcgctgtagtggatgacgcgaaccttgccgttccagcggaagtcttcgcggctgtttacggcctcgactgcgatggtgtcgtttctgccgatggtccattttgagctagtcatgtcgcaatcctctttttggagtgtttcgcgtttcgatgaggtaactatacctcagtcacatcatcgagtaaagcacttttgaacagattgtctaaaatttctggaagacaaatcaatcggccgcgtcatcgatagcgaacgccgatcgcgccaggtcgatgatctctggccatgtcaaagtaaaggttttgccgtcatcacgaatgataattggagtctgcagcggctcgcccaccagcattgtgtaggtatgtttctcgccggatgcggagccgatgcgggtgcttaaggtgagcggggattctttgtgtacggtgccgatcatcgtttcgttcctcggtgatacccggagaatcgggcgcgttggattaggctttgccgcgacggattgttacgccgcattcagtagtcacttccttagcggcaggatcgcgaacaagataagcacaggcggctttgacattcaaagctcgggttgcgccgagtttgcaggaaagatcattcccctcttcgtcccacagatgggcaatgcgagagatacagcccttttctacttcagcttctacagttacggactggtcaatgttaaataccggcatcgctttctctccgagattgttccgtttcaatgaggtgactatacctcagcaacttcattgagtaaagcattttcttcagattatctgaaaccttttgaagtcaggaactgccgccagagccagtcgatgtgttcgttgcagtaacgctcgccatcggacgacatagccagagcaccatccttgatgccgaaccgggtgacggcgagccattcgaattcgaactggagcgttcctgggcgagggatatgggacatggcgtatttctgcacggtcagtgatcctcagaaggtttcgcgtttgcgatagccgctactttctgcataccgaggcgatagaaatcggcttctttcctggctttggtaagctgctccatggcgtcgcacgccgtcttgtgctgggaattggcgttcttgatgctgccgtccaggctcttgtctaactcttcccgaagagccttctgcgatgctagctcggcctccaaatcctggattctgagttgaagctggcggttctgctcggcgaccttgtcttcgcgggctacgaagttctgcaggcggtcgacaagacgagtattttcgcgcaccagctgctgtttggcgactttggtccttcgcagttctgctcgcaatgcggacaactccagcgcatgcagatcggcgtccgattcttgcgactctgcggcctgcttattgcgcagatagtattgcccagccgcgaaggcgagcagtgctcggtctgtatccttaactgtcttggccatgaagtgggctcgatacagaggcgcgaacttgcaggcgtctgggtcccaggccagattatcggccacaggccagaatgcgcgaaagcttttcgcatcgacatgcgccttgaccgtctgcgatgcgcccgactcttcgcagatgatttccagagggacataaatggcgttcttgatgcttcggaaagaaatggtggacataacacaatcctcataagaagtcgcggccgggaccatcccagccgcatcgtaatcactcttcgccttcgtccgcgctcagccactcttcgaaggcgaaatttaccttagactcgacccaatcttgaagctcatcggcgaactcgtcactgtcgatgtccatcggaatgcccagagtctcttcgttccacagttcggcattcagttcgaactggatagccggttcgccatccacattcagcaggatgcggtctgcgacttcatattcgtcgacatcgaagaggaaaccgccgctgatgatgtgctggatgaaagcttcgtcgaagttgctgacgccgatattgatctgcttagtcattttttctggccccttatttggcgagtttgtactgagctttgagggtggtcagcttagctttcagggcgatcatagcctggccgcgcaggccttccatttctgcctcgctgatggcgatcttggcggagcggatttgatcgttgatctgggatttggtcatttctgcgttcctctgttttggagtgtttcgcgttcgatgaagagattatgacgctattcagaatggaagtaaagcagaattgtgaaatatttctcaaagtggacgaacggtatgccccgtcaggaatatttcctcccatggaaggcatttccgcatccgaatgttgattaggtatcccaaagcgcgcagtggcgaatgtgagtccgcacgtacatagggttgtattgtgcgaagtgctcgacggtcgcatccaaggctctgctattgccgcacccttccgctttgcgagccaggaagaatgcttctatttgctggtttgcgttcatcgtcttaccctccaggtgtttgttcgtttcgatgaagagattatgccgttggtcagaatggaagtaaagtgtattaacaataaaattatgttcaccgacgaacggttgtgctcgaccgtctgttgcggcgtcgatatactcgacctattgctgacaccggattgattaga

SEQ ID NO: 21 - DNA, 88728 bp, Nankokuvirus EPa24
  source 1..88728: mol_type = genomic DNA; note = EPa24
ggagaagctttcagagcccaaggcggaggtcagtgagatgctggaagacgcgctcacagccgtgtcccgctgggctattttgaaggagtccttctcctgcttcgaacctcggttccgaatctgctggaacgtggagaactaccttacctggttagggaagagcgaggcagaggtcgccaaagcttatcaggagttgtccaaagtcttcggcgtcatgtacccctttgaaagtgaggaagggtttgacacagaggaagagatttggaagaatgatcgccgactctctttcctggctcaatttatctgaggaggtgatatgcgtgatgtgacgtgctttactcaaaaggaagcccacctgtatggtggggtactaggcatgcaagacctccaattgcacctccaaggtcaagggatgagcgctgacgaagcatcccgtaaggttcgatccctcgtctccagttctggtgtgtccttgcaccactccacggttcgagccatcgcaggctactgctggagtgcggggttcactttcgtggacatcctccctcttctccgggctcacgggttcagccccgcccagtgttgggatgaatttcttcgggtgtggtggtggtgggaaaacagctaccgccaggacatggagagccgttttaagcttatggaaggcagcttgaagcatggatgacatttaccaggtttacaaaacgattggcaaaaactgtgccagcaacgaatccccggccctgctgtaccctacggacgttatatgtgggtggcggcaggccggaggactctggttttctgactgtggcctggaatggggtttcattgaagacggtcctcaagaaaatggaatgaactactgccctaagtgcggtaagacgctactctcaaaaggaggggaatgagaatgcagacaattaaactgagcgacgccatagtgcagggcatgggcaaggcgctttctacaggaaagctcagcgctatgtgtttccatttgatggaactcctaccccacggacaccctgtccaggaggaattacactgctggctggagacttatctacagacgaaaggccgtgattactcctttgttcggaccatgcttgaagttcatttcgaggagcttaacccaggcaccctccttacccgacaagaccttggccacctgtggtgcaacttctatgtgtgggccgtcttcgacatgaagcgaaaaggtatttgacttaaaattacatcccggggaggagcagatgagcgaacgacttcggagactggaagctgagtattcacgtgttgagcgtgaatggggtggcctagccaggtatgagctggagatgctcaggatacaaatcgattctgaaagaagaatcagtgagcgtaactcgtatctgtcaatctttggatgtgggaacgcattccacggaaggaagtacgactagcttagcaggccagacgttaacgtgtactggagggttgacaccaggtagcccctccggtaccttgtcttttcttgaattttaaccgaggagattttaatgaaaacttatgaagcttctgtgctgttcgatgccagtctggcaggctctttatctgttgaggccaacagtgttcaagaggccatccacctgctagaagacaaggtgggttaccactccccaaccttgtgctaccagtgtgccggccacctggaccttggggacatgacgggtatggtggtatactgcgaggacgaagaggtagcagacaccacctacgccggtgaggtcatacgcacgctgaacaagaaggtgaaaaccctggaagaggacctcagcaaggcatacaagctgctgagtgaaatccgtcccagcatccctcaggatgtcctgaagctgtggtgtgaagaccgagacaccgttctctctggcatgaggagtgttgaatgatggaaaaccgtaatgggaccaccgaagcagcttgcccgaagtgcggaggctctggtcacgcggattctggaggtgttcacccttggggtgagcctatcttcatcccctgtgattgcctaaccgagcaggaagatttcctggcatgggccaatgaggagtacgaggttgaagagggctacgagttgaacgaaagcaaccccgccgtaatggaaaacaagaaaggctggatggcccgtgccgccctgccgaagcgttctaaattccgccaacacctggatgagtgcgccgacgaggtggatacttggccctcttataagcgtgaagccctgaagaaaccctgccgtgaacaggcaggcggggatgagcgggagtgcggccaggccgcatgcaagtcactcggcgagcaccacccgttctgcaagttcgtgagcgatcaagaccgcgccgccctgtcgcaaccctctccgccgatcaccccggcgccggaactggacttttcaaggccgctggaaactgcgaacggcgagcctgtgaaatggataggcgcagatgtcatcgagtacaagagtgctctcgtatgcgtcgctaaaaacacgggaattgtctatagttctccttacatcgggctgaagattcgcaacgtgctgccagaacaggcggaggtagatcgaccagaggtggtggcctatcaggcggcggatgccgaaggcgggacgtgtttatcactccgggaagacttcttcggatacaccgtaaccagtaaggaacccctgatgacccttgcccagcatgagcgcatcgtcgaggctctccgattcgaacgtcagcagatggaccgcgctttcactacgtgcatcaacgagcgcgacgccgccttggctgaagttgagcgcatcaaaaccatttccgacaactactatgtgctatgtgtcgagcgccaacaacagttagatgccgccctggccagggtcgcagaactggagaagccagaccctgactacacacaacacccgcagatcgtaggctacgcccacaagaaagagttggagcctttgttggaccagtgtcggcctgatggcagccacatttacataggcctggaccacccgtcgaactgggaagaagagccgccgtatgaattccttactccgctctacacagcccctgtggcccaggctcagcacagcgtgccgggggagttcagcttcgagtatcgccaccctaatggcgagtgccacacggtaacggtaagccgagagcaggtgatcaatgagatgcccgacttcctgttcgaagcgctgtgcagcaagttctgcaactgcgagccggtgggcgagacgaacgttgtcgagtgttgctgcgacgagtacgcggaggaattcaaactaatcgccgccgcgcccggcaaggaggtggtgtaatgggaatctggatggaagttaggtgtgaggaccggtccgaggagtggtccgaaggtcacggctatttcccgcacaggtgttggtctcacgaaaatgaaggaccaatgggagaagctcctgaaacaagggaaggagtgattaacacgtacagacacctggaggaggaagcccggtccctggggtgggtaaggttccgtcacgggtgggtctgcccctattgcaagaacctcaggcctaaggtatagttggcttatctgtcggaccatccactcgtaaggaggattaagaatgaacattgattggagtaaggcacctaagggtgcaacgcactgggagccaacaagtcagaaatttgtcggaggatggatgaagaaagagggttcctcctggttttggtggagcaacaagactcagacttggaatccctcttatctcggtgacccgtctcggctggaaacattccagcccctaccgcagaagacttgggacggccagggcctgcctcccgttgggacggtttgcgaggcaatccacgaagacatcaactcaggaaagccggtaaaggccgagatactgaagcaccacgacaacggtttgtcggtcgcgttcttctgggtcgacgcacctgtcgaagccgaaggaaatctgtactgggcccaacgtttccgccctctgcgcacgcccgagcagattgccgacgaacagcgtcgtaaggacattattgagttggctaacgtcatccgtgatgctggtgatggaaatgattacatgctggcagaggccctgcatgacgcaggctatcgtaagaaggagtctgatgatgactgacatgagagaacagtttgaaaaccgcttcccgattcctgagggcattgaatggcgtaataccgattacttccccgtgaagaccgataacgtcaacttgtacgttattcttgccggagtcgctgctcgctacacgtcgatgtggcatgcctggcaagccagccgagaggctctaaaggtacagttgccggacgacgggatagaggactgccagcgagactggccaaactcctgccgagacaatttcgataccggttactgctatgcaactgaccggatcattcaagccctccagaaagccggaatcgaggtggaacatggctaatcaatacctcagacccgaacagatggtagagcctggctactactggtggttgccagaatatctgagcactagcccagagaagcaagagaactggcagataatctgttggcatcctttagacacgtccagggagcgtgtcggggtattcgtcggacctttgactccacctacggagaccaagttatgaccgatcacgcaaagctgaggaggctggctaaggcggcaactcctggggagtggcatgccgtgtgggaggaaggggatgacgcagcatgggcgaacctcttcccggtaatttatgcagagggcggagagacagtgatcggaaacgaaggtttctactccgacctggaccaggataaagctaacgctcaattctgcgcagcagccaaccccaagaccctcctcgccctcctggacgagattggaagactcagggatgaagtcttggccctgcgcgaaagggttggggttgctccggcccgtctcacgaacggcgacagtatcggcaacatgttgcgagagattggttacgccggtgaagtcagttaccatcatgcacgagaaatttggaactcctgtatcgacgagcaggagcgcctcagcagcctcatggtgagcgagcaagagggaggtaatgatgtcagcaatcatcagtgagtgcggtaaatatcggtaccgcctggatcgagactgttcgccaccctttgagggtagcaaggtgtacgcctacttcggtgttaaccccagcacggcggatgccagtacagacgatgctaccgtccgaaagtggagaggcttcaccgagagaaatggaggccataggttcattgtggggaacgtcttctgctatcgggccaccgacgtgaaagagctgcgaaaagtggacgacccgtttggacctaaaagcgtggattacttccagtccatcctggccgaagctgacatcctggtgccgtgctgggggagcctgtcaaagctgcccaagcaccttcgtgggtgccctcctcaacttcttcagtggatgctccgctctggtaagcccgtcatgtgcttcgggctcacccagtgtgaccaaccaaagcacccccttatgctgggatacgacactcctttgcaggagcttgtagggagctggtgactcttttcacctctacttaaagccccgggccttgacaggtctggggctttgtcgtatctttctttcaacaaacaggaggtggtatgaacggttctagaaaatttcacagccccgatggtccagctttcttcccgggtgaaatatgggtaagttgcgaagggtttgaggttgagattttgaaggttgagcggtacggtaccgacaagtgggatgttgacgtttactacatccagtgtcggtggaaaaatgcagatgatgctgtatttgtgaaggatgcttggaatttccaagtaagatatgaacatcaagcagataggagggtacatgaaaaaattctctgagacttactactcttggtcgggggctgccagccgggcaaaagttcttactgacctgggttggattatctctattcacagggagaaggttgaaggttctaccagtcttgtttggaaattggaggcaacgcgatgagtgagaaaggaatgatcctggcaaagtacactggccttctgtgtggggttaaagtcctccaacgtcaaggagataaggttcgggtaaaggtggtcgatgagaagcgtcccaaatgggttgacttggcttctggctcctacaagctattcaacaatactgatgaagcaatccaatggattgaatccgaggaggtgaccaatgaaacaaactgaaactgctatccgaaacatccaaagaatcttcccgttcatggacgatattcgggcagatttggtcgcggacgttttagtcatggtagggggctatttccccaaccttcggaaatgcagtccacttcttctcaaccagatcgtagttcatcacccagaccttaaccgacaggaaagtcgaatgctgaactcccgaagaaaaacgtatcatcacctggccacactttccaaccagttaacccgtagtgttcacccctcccaggcaaaacgtctacaccgcatagcctctatgctagcgaagtaacctccaaaggcagctatttagctgccttttttattgccctttttcagcctcctttgatcctctatctcactcactccgtacagtctgtagccccgctgcaagcgctttgagaagacttctattgaacctgtacacatccacgcctctcctccttcgtacattatgtaagcttcgtatttcaaacccctgccctccatctttctttcctgcaaaagaaaaccccgccaactttcgccagcggggtttcattcattaggcatcctgcctggtgttatcccttactccctttgggaagatactcctcaggcatggtccagtcatctttcaacagggaaaccgtgagaggaacgcagcattcctgccggaaacagctagtctcacacctgtgatgacagcggcctccatccaggcagcgggttcccaagatttcgtcttctcctgctaaaatgccgcattcagccttcaaaacggaagctcccacttgatgagtctttccagggctacctcgatgtccttcgctctcagggggtcttcgtgcccctcgacggggaatgttgcctctaccttcacatcgtcgattaggcaagctccagggacctttcgtactaccgttgggaccacgatggagacgatttcacacgcgggagcgtaactgtacacctcgaattccgctgaggccccttcatactcattcccttcgggagtccaacgactccacacgtaattgacgacaattctcattcgttccacctcgtctcaccctgggcttttctttctagcatctgcttctcctgagcttcctggaaccgggcctcatcccaggaagacttaccgtcaaccaggattgacgccagaatacccaggattgccaggactatcatcgcttctgtcagggtgaaccctttttcctttttcattcggtctccttggcttgggtgaggagtacattggcttgacgttccatctcggcgatgtgaaggcgctggaagccgttctgagtttccatgggagagagcagtacctggtttgccgggtaaccttcctccggggtttctttggtgtcaggctgaggaaggtagcggcgccgctccagctcctcgaacaggacagccatatctttgtccatctctcgggtacaggtgatcacaccgttgattttccagcccacaccaccaccgtgtatggaagtgacactgacagtgaaagggtcatgtttgttgctcatttgggtctcctgaaggtggatggaaagaacatcttgttgcagagcgtccaggtaggtgcggacctctttgtttcggttggcatgactgtccaggtggctcagatgtacatagcttgcaggacccagccgtgcagccctgtccgaaaccaggttgaacagcttgagggtatctcgcttgagatttcccgacagaactatccaggaaggctcaaactgagggccgtctgcatgatcggtgtacaggtctacggtcagagtgctcatgtcataccccgttgttaaccaggtaggtcaccagttcagtccggagctggatagtgctgggatgaccctgaagggtccaatcatcgtactgcccagccttctctttcaggaagctatacatggcttcctttaggtagccctcgtcgccagtaaattgccgctggcagaagactttcatgccccggacagtatcttgctccaggatgagggtgatcggtcggcttttcatagtatctctcctctttcacgggcttcagcctcaacgtcgtccgtcaagactttctgaaattccatcgtacactggtagaccatctcattcaagattctcttgttgagcctcttgcgacggttctcgtgttccagcacctggcacgcttttggacgttttggaagcttgcctaccaggcagtcgtactgctccacagtcagcaccctacttacctggacacttccaaaaccgtttccagggtcggtcataacttccaaataggagacgtaagctagaccatgaaacgcctcttccaggttgttcagcttcaactccgtcacggctagtcccatagcttatacgacctcactgtcccgcccgagtaaatatccagtgcctttgctgcctcaacagcctcctcagcgctggcccctgccatcatggctcccagggcgaactgagttcctgacccagcagcccgtggcctttcaaggttcaccttttcggagtagatgccgccgtcccaggagataaagtgcagaccatctccatcgagaaccagaccggaaaccttcagctcctggtcttccattccgtcgccgttcacataagcctcagcgagaactttccagtcgcataccgcccctgacagccagaaaacaatgccatccacttctagccgtttttcagcgtcctcgtcggtgattacccctccctgggtgatccttccatcggttgcaatgatcccatccttgtaagcgatggtggtcatgcgcgtcctaccttcttcaggtacagacgaatgagcgggtagctgacaggcagcagcccaacgaggatgaccacccgggcagtccaccaagccagaagaacagcagcatcccagacttcagctccgaggcatgccaagtcctcccggttgaagggcgcttgaaagtgaagcttcagttgttccattttggacatctttttcatgattcctcctatgggcagcagcggggagagcccccgcagtagaattcaccttcctggcagtgtccgaagtagttgggataccctgacctgccgcaatcccccgcacagtctacttcgtctaccattccgttttgtatttcattttcccacaacacctctcgaaggtgtaagggtactttttgccagtcaaatcccattatagcttaccgagtgggctgaggacaggtcccagataaggcaatctttcagaaccagctccgtccgttcgggtccatctaatggaaccagtgcggtcatcgaagtaccgtcagagtaggaatctttcacatgaccgaaacctcccttgaagaggtatgtacggtaaatcaggtcatcatcgaacccttccacccctttcaagtacagcacgacactgatcccacgctccaggtttgagattgcctcctcgaaattcacctgcttcattctccctccttcgcttcaagccacatggcacgggtttccaccatgatattgtccagggttgtattcccgtataggtgcttcttgcagcgggtggcagcaacgtacaggagattctgctccatctcgttcaaacctacccaccgcttcttgtcatcatacccactcggatagtcgtcagccaggacaaccacatcaaactcccgacctttggacttgtgtgcagtcgtcagtacgatgtctgccgagggatcattctcatggtcacggagggccttgaaaatcttccactggtcatccccttcgatgatccggcacaccctgcccagttcgcccgggctctctgcgtattcgtcccggaactcttgccaagaagtgtagcacagtatgttttcgtgcttcaccttcttctcgtcaccctggtacagggcggtagcactctccaacagacggataaagtctcgggtgtcaatctccagtcggacactcttgccttggccaatcaggtttacagcatcccacaccaaggcagcgttggtccgatagagccgggcatgctgctccggaatttcaggcaccccttcggcgtcaccgtccgccaggaagccgttgctctcccataccttcgattccagcttttcccacccgtgaagggcttgggctttgctgttctgtaggatgatgttcgccacttcagccaccttctcaccgaaacggaagctggtggtgagcttgcactctggggccttaatcttggccatagcgttcacgctgccacggaagctgtaaatctgctgccgagggtcaccgaccatgaccagcagggagtcctgctgacgaagaacgatgtccaggacgcaatcgttggtgtcttgggcctcgtccagatagatcaccttgtactggctgaggtcaggcttggagagctggtacagcttcaggtaggtgtcgtggttgatcagcgtctgctcgttcgggtcaatacgcttcttccacaaggcctttgcatagcggagaaccagggcctcatagtagggaaggtctacacggtccttctcggaaagctttgccaggggcatgtagctgatgtgcttgacctcaagctcctcgtctgccgaatactcgaatctgttcaccgtatcgcggatcgcctggccaatgctggaagccgtgacggtgacccccatgtccgattccatgctggcgatcttgaagtagcgggcaatctctgccccggtccccaggacgttgacgtatccccctttagggcggcgaagtttctcactgagcttggccccgaacaccccgtatgccaggccgtgggtcgtcttctttaccacccactgcgggaacttgttcttggcctcttctgccatggacttgttgaaggccaggtacagggaggtaacctggaggcgttgagagaccaggctcatggtggtggtcttcgctgcaccggcccctgcattgattttcaggcggcgattcggacgttgctctgctgccagttcttcggcagcttccatgatgtcccactgctcactggtcggggtgaaactcataaaaattctccttaaattcacaaagcttggggtatgccaacaaggccgccttcatgtaccgactggcttgcctgtcgtcgatgaggagcagtttacggacttcctctgtggaaatcaaggggaggaaggtaaatattttacgcagagccgatttcgacagaggcacctgtctgtagttgcctgtcgtcccgctcacaccctccttacccccggcgctggaccggtaccaatccaggttggcaaccccgtggaagatgttgtccatctccaacggccagggatcatccctctcaaacgcgatgaacgagaacaagggcatcagttggttttccaactggcgccccttcttgttccccttgcgttctttgtcagccctgagccgattagcccgcttaatcagctcatttgcccgggcttctattcgggaatagtcccgtatcggtcctccattctcttgatccattctgttgcccaacctctcgattcctcgttgtgaaggttcgtcacccgaacgccgtgcgccttagccagcttgacggctgtgtttgtgcctccctggacgctcccgtccttgttcgggatagcgaagcatattaggaattcactgggagtctccagatcatcccccagcacctggaagacattcctagtgtggagcttctttgcccccgggctgaggtgttcccaggcaggatggaactgctgggcaatctgctgggctctgactcccagatcgtaggggatatgagacagggagactacagcaccaaaggcatctccatggtgaagcctgtcatagaagccattccacggtatgtagattcggccattggaagtaccatctccatcccatatctgatgcttccaccacccctcttcaaaggcttggtctgcccctggggctccacctgtacggagggtaatcccagcggcggataggtagtaccctagcttgaccatgatgtcaagaatatacccaggagtctcccgtgaccctacacctgtgtagaacagactcatgtggttacctcgaaccctttagattccaggaaggacgtgatgtcgtatacctccatctcccccaaaatgtcccggggatggacattggagatgacgtaatccaagatatcatcatcacccagttgatccagaagagcatcgaccgtagactttacacctgacatctcgacagtcacttcaggtccggaatacggattgtacgttgcttcaacctcgaccttcttggcttcgattaccagttccatacttcctccttatgatttgtagtacacgtgccgctcgattctgagcgtctttttcatggttttcgtccagcggggcatatatttgaccttcgcagggttcaggtagtgatcagcacctcccgtggggtctttggacagaccttttaaagccctccaggccactaccttagattgatcccactgcaccttctcttggattccttcctttcggcttccatcacaagtgtacgagaactggcaacggaagtacaccactcctggaactgttgaaggccatctgtctgggttgttcaccctgttgatgatgacgtgcgctacaccttccttccctttccagctctcgctccgggcttcgaagtagatcgcctctgccagggttctacaggacttctgacgctcgcacaataccttgtaggtttctcttttctggacttcatccagaggttgactgctgaggaccgctcgtttctcaagaagatggaagcgagaagtctcaatgcctaccatgatctcgaacagtagtccggacgcggccaatagagtgctcagacagagcgcttctagggtcttcattcgggctcctttctatcaggtgggtggtatgccggcattgcgccggcacggattacaggaacgaggccaggccgttccggaacacagggaaggcggtactcaggaattcccggctgaagttttcttggcagaacttcacttcatgcttatagcagaagatgacgaagtttgcttgcttgctcttccgagtccgagtcaggaacactcgtttgacgatcttcgtagcctggctcaactggaagccgtaaggggtcagctccaggcctttcagtttgggattagcaggggccaaggtgccgctgcctcgaccagtttccagccacaagctcttcggctcgttgtgaagatcgactgcggtctggaaagacagtgtttgtaggcccttgctcttcaactcgggaatgctcgtatagaagctgcccgactctgccaggaaaccatagcccaggctgcccatgaaacggatcaggctgtccatttgaagccatgcagtgttcttggcggtcgccgagtcgaaagttgtacgatgggtgaatcgcaacagcattttcatagtaaactccttctgtgaactggaggccagtatgcctggcctccttggggttgtcaaccttagtctacgggattgccgttttcgtccatttcccgccagcacaggccgactgggaactggggaaccagggtcttcttgaaacggccttggtatttcaccttcaggtaacgcccgatgtatttctccggattggccagttgatcccggcgagccgcatgatctccgaaggttgtatcgaaaattcccgtggcgtattgtccacgaccgtctgctttctccttcactttggggcagaagacgcggagaactgcgttcccgtctttgccttccaccacgtcaacaacctcgaactcctcgtccaggaatttcttgtacttctggaggtcggaagatcgctgggatgcttcgtaaagccccgtcatgttccgaagcatgatgccttcgtacccttccatgaccaccttatcgtggtacttgtctacatcctcccggaagaagattacgtcctgatccactacaaacagggtggggttccccataaggtctgcgctatagacaattcgacgaagtgcgtctagacgccaagagaattgggtatcaacggtaacacccaacgctttacagctcactacatcgaagatgtggtattgcaacgccggacgcagagcagcgatgtggattgccaggtccaaggcgtctttggcttcctggagttcaaaatcatcggaaaactcgtcgtcctcgtacttcataagcttcttctcagctttctccacctctttcaaggtgtcagtacgcttaactgccgactggatgtcttccagggactcaccgtgcaggtaaatctcaccatcaaaaatgtctccaatctccatgatctgggccagagcctcggcaacgtgtggcaggatgtactgctccccgccccgactacgaagctccacacgcccatcttcatgtcgaagagccaggcatcggacaccatccatcttggggctgtagatggcggggaaggtgatggacttggagcgcttcaggtaatcctctgccagcataggaaggataggaacatggtccagatcactcttatcttctcggtaacctgccttgaattgcttctcaaccttggaagtggcttccagatgggcctgctgctcgccagtggtctcgtttgcacggcctacgttcttcggcttggaggtggtcaccttgacagtcagctttccaccctcctttccatgctccacgaataccttgtcaccttcactccagcagctccactgcttgaagttaccgcccttatccttttggtacattgtcactttttgcataaaccctccttattaacgaaattcaccgtctgagctttttaccagaatggcaaactcatccacctcgccgagcgcttgtactccaaactgctcttcatatgggttgcttccatgctgctcagcaacatgcacagtagtcagatacagctcatccatgaaggctcccaggggagttgttgccgccactgcggataccttgcctacaagagctgcaagcatctttgtctcttcgtaagatagctcaagcaacacccgttcgcgtttcttacagtcttgtgcgtacatgtttaatctccttttggcatgtggatgacttcaaccccgttcttcagcaggtaatcaatgcctgccgtcagtcggtactggtggcgatagtacaccctcttgatgcctgcgtcaacaatgtcgtgagcgcagtattcacacggggacatggtggcgaacatccaggcaccctgagcactctcctggctgcatgagagccatagtagagcgtttttctcggcgtgccgtacctcgggcctggtaaccccctcctcgttctccagagggccttccaggccgcttgggaggccgttgtacccctgactgatgatcttgtttccctggacaatcactgcaccaaccttcgcacgaacacctacagagcactcagcgaaggactcggcgcagcgcatgaaagcctctttatgcttctgcttcacagggagtacccctggcttttctctgggtattccaacacataccggtttttaacctgtacaccgttgatggcgttgtacgagtcgatgcacatgtccagaaccagctcagcaaaggattttgacaggtccatccctgtcaggtcttcgatatttgggcaccgacttttaagtgcgactgctccttcgtaaatctcctgctgagcaatgatagctttttctaggtgtccctcgggaatatgtacgtctgggtcggtagggtccataacccacacctcagcctttctcacggtgtttggccagataaggtggcagtcccgccatttgttcggatgccaggataataggcgatccagaagtggttgatacatcttgacctttgggcggtaaaccgtgagcccgttgttcagtttctccaccacaatcattgtcttcataacacctcctaggatggcttgcgttggccttttctggttgctgtcccccggcaggtgaggtctcctttggcctgctgcatcttgctggccttcacagtgtaccgcccctttccgtactcttcgtctacgaacgtctgggccttcatcctatctcgggtgtgtacgaatacataatcacccatagcgttctggatgtaccaggtagctggcggtgcgaagtccaacgccgagaagtcctggaaggtcaccacggtagttcttggggtactgctcatgtctactccttgcgggattactttgcaggggcatcctaacccaatgcacctgcaatgtcaacttatttcaggcgcaaaaaagcccgccacactgggcgggcttaggttatcagctttccactgcttcttcggagacttcagcggtctcctcttgcttggggcgtttctcttccggcactacaacgctgtacagagcctggagcatcaggcctacctggtcctgtagctcggcttgcaccacggcgtagcggccattcacttccatgtagtccttggaacgcaggaaggagtccaccttgcggattttcttccaatcggtgccatctgccgtcatcactcggtcgaactctttggccaggggttcgaggttgaccacctgcacagcctggtacagtcgatccagagtatcttcgtccggcataatcggtacgagaacactcatgagggcgtcatgtgccatttgcttgaacaggtcctggcggttcagttgagttgctttctcagtcattcattctctcctttttcaatttgttcttgctcagcatcatcctgctgcttaggtttcggctttggctgccgctttttacgggccggtttctcagtagcctggggctcggcttcaggttgtgactcagcttcagcttcgggctcggaagagccgaagtcgaacacaacgttctcatcttgccccttctccaggacagcccagtgcaggctactggacaacatggacacacgggaggtgtccagggtgtatcctgccagaacctgggattggaatgcaagcaggaaattcatgaggttgtagtctttgacctcaacggcgttctcagagagactctttacggcctccgggctggcgacttcagtcgggccacacacttcctcgtggaagagggtgatggtacgaacacccgaagcagagctgaccactgggaatccagccatggtgttctcaacacggtagccttcagcgatggcatcttccacggcttgcaggaagctgatggggttttgttcgactacacggatacgcttacgatccgctggataagcaggttttacggacattttgattcctccttgggattgagagtacactataccaccatctgaagcagaagtcaaggcttgacaagctaaagaatttatagtaatattattaaatatattatatataatatacaagggagggagtgggcaagtgccccctcccttgtactaagtatataattaatattaattactataggttaatttttatgagatgtaaaggctgtaataggataattaagtatcctagtaagaattcagtatcaggtaagcatgaagacctctgctccctgtgtcaaggccgtgccaagatggtaggccctactgagaactacgcattccctcatgcgaagcagggcttgacaccagtccgtcaatgtgactagggattgacaaacacacctacaggatgctatagtatctatagatacaccagtttaagacctgggagggttcctcctccttcccctctcaggcacccaaccaaggagtaagtatgagcaagttcgtaaagggccagagtggcaaccctcgtggtcggcccaccaaggaagctcaggccctcaaggcgatgtctgccggagagcttgatcacatcctcaaaaagctgaagcctgccagtgccaaggctattcagctcatgatcgacgaaatgaccaatgcgtcccagacatctccagtacgtctcaagatggctgacaaggtgttcgctgcctacctggcagccctcagggcacaggcgtccattgacgcagtaaagaacaagtctgacggtgttcctgagcaggaggatgaacctcaggcccaggtcgtagaattctcgctcactatgcctgccaagagaggagcatagcatgcaagtcccagtagaagtaatggaccgggtgttcccggagtcaagggtgtatgtggaatcagttctggctgactgccaaaccctggaagacctggtgaatcacaggatcagcctaagccgtaagatgggcctcaaggttccaggctctccggagtaccgagagctttggctggctgagcaaagtatccatgagattgagggctatgtcctcggctcttgtggtgtaggggcctcccagccccactaggcgttcccggagccgtatggcgggaggggttgaaggttcaccacacgaaccccctatgccccggaggttgccggggtaggtccttcaggctctaaagtcctggagaagtgtcagccggacctttgaggatgggagtccaccggcactcttgacacggcgtactgaacacggtttaataccctccacgagtaaacaggaggtaccatgagaaacatgttcgttacgccccatgccaggaagcgctttcgtgagcggttccggctccagttccacccttcggtcttcgaggacggtagagacatctacgtcatccggaagcttttcgctgaagcgaaatactgtgattttgagcttcgtatgcggataggaaactataacgcgctctgcgtaaagcacggcagggtcgtaagggtttccaaggttcggaacttcgtattcgttcacgatgactcgacgatctacacaatcctgaaggaagggatggttctgtcaaacgtgaggttttagggtaggggtcttggcgaccaggttggactccaaattcaacccagctcagttcgaatctgagactgcccgccaaaaatctcttgactttatctaaaaatgtggtaaagtggatttaagagattcagatgtgggaccgacgaagctgatgtgcagaggaggtgatccagcatctcccggacgggtccgggttaccaacccgctaatttcatagcccgacagcaagggtagttcctgcggggccagggtccaagtgaccctcctacattccgttcggtccctcaaggcgagggagcttgactgttaatcaagacgtgcctggttcgattccagggagcggagccaaaagagtaacctccacgcataaggcctggcactgcgcaccaggaggttagtttcaacggaggggtggcagagcggtttaatgcaccggactgtaaatccggcgtccgaccgggcatcgctggttcaaatccagccccctccaccaaatgctgtgtaagttggactgttgcagtgaagcgataggctccccggatcgtaagccggtaacgtggggatagagggctcccaccgctgagcaacaggaggttcgattcctcaacacagtcccaaaactgctacaggcagttcagctaggctaggcttgagaggtagtagcccgtttttccaaaacctctcacttacaatcaggcgtgtggcgaaaaggtttaacgcactggactttgactccagcatttgtgggttcgaatcccaccacgtctgccaatctacccgatgctaatcgggtcttgtcgctccgggtcagcgactcagaagtgacccttagccccggcgatcttcgctggggctttttactttctcaacccgtaatggaggttgcaaatgacgttccaattcactcccgcacaagcaagcgtgatgtctgacgataagcacagtatcatcctgtacgcctcccacgcaggcggaggtaagtcccacctcgtagccaagtggctcaccgaacccatgcacttggaaggatatcgaggcttggcagcccggagaaccattccatatcttacgggccctggaggcctggcgcaacagatagtggatgttgacccaactctacggttctttcgaagagatttgatggtaaggactccagatcgcaggtcctccatagttcttcgaggcatctcaaacgaggaagcccctagaagcctgggaggattcgtatttcaaagggcagcggttgacgaagccaaccaggtagacagcagcgctctgacttacctgctgagcagactcaggaacctacagtgtcctgaggtaactccccaggttttgatgacattctctcacggagactattccagcacattcctagacgcccttgtgcgacccttcattgaaaaagaggatagcgcacgaggacacggcggggtagggaggattgatcccaagaagagtggtcagacaagatggctcacctttttacgagggttgccggttgtcgcaaagaacccggagtctctgatagacctcttggaatgccacacagggcaagagccagaagaagccaacctcatcccgtacaccctgtacttccagccggacgttcacccggttgtgaaagaactctaccccgagtacgaatctcatctgaaaaccctcgcatcacctttaagtgttcagatgactggctactgggggtgacgaatagccccgcatagcggggcttttttgtgcccagggattggccccgggcaatgcaacaaggagcctaccatggcttatgaaatgaccccagaggataaggtcctctacgatgcaatcgctcgaatcggcgtcctgggagctatccaggcaggcctgatgaaggcaggggacggtggggagcctgcaccggcaccgaccgtagataccctggaaggcgctggagccactggtaaggcagtgatgaaagctgcggatgctgctactgcacgaactgctattggagcaggaacctcgaacctggctatcggtaccagtgcaagcactgctaaagcaggcaactggaaacctgcctgggaggatgtcaccggaggcgacgcagccgtttctgcgggtgttaaggctaaggtgaattccgtcgcagcagtggccgaagacgccgagttggcagccgtcactgccaagcttaacgaactgttagctgccctaaaggcataaacagggactgggggcttgacaaagttaagcccctagcatatactgaccatataagcaagagaaactttgagggcttgacaaatgactaagacagtcatcggtcctaagtctccgaagcaggaagcgtttatcaactccactgcgaacatcaccgtgttcggtggagctgccggggctggtaaatcctacctcggagtgatggactttctaaagcatgtgaagcacccgatgttccggggcctgatcactcgacggaccactcctcagattaagggccctggcggtatcttggataactgccttcagttgtacaagcagtttgacaagaatgtcaaatggaaggataaggacgggaaattcgtcttctcctcgggagctgagattcaccttcgacactttgcccacatcgacgataaggacaactaccagggtctggaaatcaacgaatttctcgttgacgaaggacagcaatacaccctggaaatgttgctttacttgatgtctcgtatgcggggtccgaagtgtccagaggttgaacctcacatgaagatcacctgcaaccccgattataacagtccgctgcgtaagtggctgacttggtacctggaccctgagacaggtatcccgctcccagaaagggacggaatcactcggttcttcactatccaaaacggagacatggagttcgctgacacagcggaagagctgattgaaaagtacaatctgaagtctcctcccctgactttcaagttcatttcggcaaacgtctacgacaaccctgtcgtgatggagatcaacccccagtacgttgcctggcttgaaggtttgaacagggtcgagaaacttcgactgctccatggtagctggtttgcccgagaagaggcaagcggctacttcaagcgagaatggactccaatcattccgcttaggcctacggataccgtgcgacaggtaagagcctgggatatcagcggtacgcttccgtcagactccaacaaagagccagactggacagcgggcgtattgatgagcaagggccgtagcacgctatacacaatcgaggatgtggtgagggaccgccgccgtattggtggggtttttgaactgatccttgagacagcaagacatgacggagctgacactacgatcctgattccacgtgatccaggagcggcaggacagcaccttgcatgggactttgttcgccgcctggcagagcacgggttccatgccaggacccgtccaaccaacaaatcaaaggtcacccggttcggtccttttgccagtatggcagaggctggaggtgttcaggtagtagaaggcccctggaacgaggcttacctgacggagctggaggtgtttgatggaagccggaatgttaaggacgaccaggtggatgccacctcggacgcctacacttatttggcatccgacatccacattcccaacttcatccctccggacctgacccgaccaaacccgctggccattgaacgataggaggccctttgtggctcggagaaagaggaacgtcagaaaggcggcagaagtgccatcggccccccgccttcggctgggcgaaatcggacacacgggcctaaagcaaagcggtggtgcaatctacgaggaaactcgggctgagctacggttccccgagaacctgaacaccttcaaggtgatggcccgagacgccaccattgcaagtgccctggcattgttcgaattgatggtaagccgtgtagaatggagtgtcaagggcggtacagagcctgacgctgccatgcaggagaaggttaaattcctctcccaggtcatgcacgatatggaccacacatggtacgacttcatcaaagaggtgaccagttgcttcacttacggcttctcgatccatgagaaggtgtaccggaaacggacgtgggcaaatggctccaagtacaatgacaacaagattggcctgaagcgtctccctgtccgttctcaggagaccatcaggaagtggcggttcagcgaggatggtagggacttcctcggtgctgtgcagtctcccaaactgatcagtggatgggagcagcggtatggaacctatctgaagaacctgcccaacggtggtgatgagattttcatcccgaaagagaagttcctgaacttccgtatcgaccctcgccgtgacaaccccgagggcaatagccctctgaaaaacgtatacttcgcctggagttaccggactgccctggaagagcaggaagccgtaggcattaccagagatatgaatggtatgcctaccctgtacatcccgcctcggtacatgtccccggacgcttccgacgaagagaaggcgatctacgagtattacaagaacgccatgcggaacatcaccatgaatgagcaaacgtcgctcattcttccgcagcagtttgacccggaagctcgcctcccgctgttcaagttcgagctgactagcagccagggcggtaagatgtacgataccgacgcaatcatcaagcgttgggataacaagattctccaggtcctgttcgcagatgttctgaagatgggccaggacaacgttggctcctacagcctggctggtgctaagaccaacctgatggctatggccattgaagcacgtttgcagatgatccgggacgtgctgaacaacgacctggtacctcaactgttccggttaaacggatatcgccccgatgaagagttccccaccttcgagttcggcgacctcgacgagattgacttggatgtttactccaaggcgatccagcgaatgatgtccgttggtggcctagagtttactcgtgatgtggccaaccgaaaccgcaaggccattggcctaccggaacttcctgccactcaagctatcgaccgagaggctctgcccttggcaaacgacagcaaggcaggggaggggatgaagacggcgggtgaagggacttctaagagccccagcgcccgcgatgattcaaccgcaaaccaggataactgaaatggctgaagaaaaccagccgactcccaaagaggacgtggtgaagagtgttgacaaggccgagcgccgggcactctttgtcgtcctggctccggatgaggtggaccttcacggggacatctactccgcagtcgaggtggagaaggcatgcattcagttcaaccggcactgcatgaaagccaacctgttccacgccgtcgagaccgaggctgcccagattgagcaaagcttcatcaacctggccgacttcgacaccgacgatggacggaccattaccaaagggacgtggtgcgcttggatgcacttcccggaaggtgatgcgctggcagatgacctgtgggcaggggtgctggatggatcgttcaacggcgtcagtatcggcgcccgagcaactgtagaggacctcaccgatgagtgatcgaaaagccaaacgccggctgaccgacatctcttttgaccatgaaggcgctcatctggcgctggtccataagggacaaggtggccctgcgaatgggtatacgaccctggtaaccaaggcacttgacgcgggaatcccgcaagacgtgctgaaagccaccaaggtcaaagtggagctggagttcccggagttcctccggaagttcttcaacatgtactacagcgatgcagagatgttgtctgctgccctggggtacggcaccactgaagggaaagattggcagatggacggagagtcgtaccaagagtacatcgaacgccgcgtaggtggcatcgagattctgaagtccctgtacaagagcgaggaccccgttgccggcttgaataagcttgacgacgcggcaatcgtcagcatcgcgaaagctcgtgacctgctggaaccccatatggccaccgcttctggggccgaccacaccaacaaagaggaaagccctgtgagtcaagaactcatcgacaaagctgtacaggcagccgaagcaaagctgcaagatgaactcaagaagcaagccgacctgctgaaggctgctaccgaacaaatcgccgccatggaagccatccagaaggccgctaaggtagaagctcgtaaggccgctgtagccggttccggtgctgacgctgaagctcaggttgagctgatgaaagccatggaaagcctgagcgatgaaagcttcgctgtcgttctcaagcacatcaccaaagcaaaagaagttccggctggtctggaccgtgaagtcggtctgagcggtgcatctgacgctgaaaacgctagccaggtagagaccctcaaggctctgatgctggccaagtacaccaagcaataaggtataggagcccatcatgcccgttatcgctaccgaccatcagcgcctgagcaactggctcaagtatgaatacgacccggcctccggcgtaacccgcgaagtcatgccgaaaacctggctggacccggctgtgaaagcgaccggctcggttctggacgctgacggcaagctggtcaccaaggcgaccgctgccaacgctgcctacatcctgatcgattgcgagcaccgcgccgctgctgaccagtttactcaggtcctgcttctggcacgtggctacgccaagatcgccgacgaaggtgtgatctttgcggacgatgtagaagccgcagacaaagaaaccgctttcgcagaactggcgaagaagaacatcttcgctgtacaccaggtataaggaaggaaccatgcgaccgattccctcgcttcagaacaacttcgaatacaccgacctgaccgagccgatgatcctgatcccgaacgtgtggggtctgacccaacagctcggcatcttcggtgttgaccgcaccacccaagagtctgtgactctggaagaaatcaccaagtcgttcggtctgatggaagatatccatcgtggcgctcgccaccaggttggccgtgactatgatcgtcaaatgcgcaccttcgcggttccgcacttcacctacgacgattacatcaccccgcgtgacatccagggcaagcgtgcctacggcaagcaagagctggaaaccctggaccaggttcgtatgcgcaagctggagcgtctgcgtggcactcacgccgctaccatggagtttgctcgtatgcacaccctggttaccggcaagccctacacccccaacaacaccgttggtggtgctaccggttacgactggtaccaagagttcggtaagacccgtttcgaagtcaacttcgagctggacaccccgaccaccaacatcctggagaagagcgagctggtttacgctcacatgcaggacgaggcctacactggcggcgtagttggcgatgttatcgctatctgctctccggagttcttcagcaagctgatcagccacccgaccgtggttgaggcgtacaaatactacgccagccagccgcagattctccgtgaacgcctgcgtgcccgtggcttcgacgcccgttaccgtgagttctacttcggcaacgtgctgtacatcgagtaccgtggtggcttccaaggccgtccgggtggcgagaagcgccgttacgttccggctggtgaagctgtcttcatccccggtagcggcaccgaagacctgttcaagaccttcttcgctccggcgagcaagttcgaacacgtcaacacccccggcgaagaaagctacgcgttcgagtacgtggacccgaaaggtgagttcctggagattaactccgagaccaacttcatcaacgtcctgatgtacccgcaactggtcgtgaaaggcaaagcggcctaagaaaacgggggccttcgggcccccttttttggtcccgagaaaaggagtaggatatgccctacacaggcgatccgaagaacaatgtggtcgatcagctccgcctgatggtgggggatatctgggacgacattgaaatcttgacggacgaagattaccaatattttatcgacatgtacaatggcaatatccgcagggctttcctggacgttgtacggtcaatcctcttcaagctggcacgttacgtcagggaacggactggtgatattgaggtctacggaagtgactggtggaagggctataggcaaactctccaggatatcttgaaggacccgaacctgacaaccgtgattgctctgccctacgttggaggtgtgtcagccaaagacatggccatgaacaatgccaacccagacaacgtggcacggaagattttcattggattcaatcgtgatttgcggctttacgagcagcagaacgtagggtacaacgacatgccgagaatcgggaaggccctagatgcccagccgaatctctgctgactttcggaagctagacgctctgattgcccggatggaggccttggacggtctgacgctggaaggaggcttcttccctgaagaccggtacggtccagagaatggtaacctcccagtcgcccaggtggcagcctacaacgttttcggcacggaaaccaacccggaacgagacttcatgactcccagctttagtgactgggccacggtgaactactaccggaaagccatgaagcaggtggtagaggctaccattcgagatgggcggacccagaaggggcagctcaacaagatgggccgaaccatggtggagattatccaggtcaacattgacgacttcccaggccataacagcgctcgctgggcccaggtgaaaggctttgacgaccccctgacccatacgggcaagatgcaggatagcgtcaagtacaagatcgtgaggaggaagtgatgctcacgccacccatgctaagcactcacttcgtcaagaacgaggtgattcgccggcccaggaagcgcctggtccgaggacggcctgttcaagaccctccggagatttacattgtcgagggaagcttccagcctgtgctgaaaagcacggacacgatgcaactccccgagggtgaacggaccaagaaggctttgaaggtttataccaggaaccacaccaccctgcgagaagccaacgaggctgaggatggctgggatgcggaccagttctggtggaagggcgagctgtacgaagtcgtgaagaccgcttcctacgacatgagggtcctggatcacgtcaaagccatgtgtgttcgtgtggagggtacctgatggccctgaccatggacgagctgagggcgaaataccccggcatagaggacatttacacccagttggaagatgccctctacaacgtggctgaggctgctttgggggatttccctctggtgctaagctactgtgataaccaacagacccagacgcctgcactgtacatcgagccgatggacatcaaatcggtattcaccgagcaggtagcaggcactctggagattgacccaacagacccagagagggctgtgcaagaggtcaccaagtggtacacccttaaagcccgttttacaggcctggggagtccacacaaccacgccatggcagcggcagcagtccagcatttggaattcttcctcagcactgaggatggttaccaggctttggaatccaacgggttttcaaagaatggcgccaatccgattcgccggatcagggatcaacgtcccaatgagctgtaccagcatttccggtacgatgtccatctgtcctacgccataacacggaaagaagaggtgacctggatcgaagctttggagctggacgcggtttacaccaacgccggacgagagcctgaccacgttatcaagaaccatatctcactcaacgaggaaccctgaagatgacccgtcttaccgacatcatccagatcaccattgatcggcaaacgcagccggtagccaccactgcgttcaacgtgccgatgttcctggctacccactccaacttctccgagcgggcgcgggaatatgcatcgacggaagctgtcatggcagacttcccggacaatagctccgtaatgcaggcagcccgtatggccttcgcacagaacccgcgccccaaccgcctggttgtcggtcgccgcaacgtgccaggagccactgtctccattgtagaggtcgcaccgcagaccacctacaccatgaccctgaacggtattccggtgagctacctgtcgaaaccggaacctgtggatgaagatgacgagccggcagacacggcagtaaccatctgcgcaggactggtagcagctttcaacgtcagcccggtcgttggcatcactctgaccgacaataccgacggtaccatcaccgttcgcagctccagcacctcctggtcgctgactacctcggcaaacctgtcgaagtcgaacatgccgtccaccgagggctggggtgccgctatcctggcagtaagcgctgcgaacagcaagtggtacggtgctaccatcgaatctcacgtcccggcagatgtcctggaagtggctgctaccatcgagtcgatgagtgcgaagaaaatcttcggtacctctaccagctccgtggctgtgaagaacgccactgctggcaacatcctggaaaccctgagcaaggcaggctaccatcgtaccttcctgctttggaatggtcgagctgaccaggacttcccggagctgggctggatgtcgagccaactgcaagagcagccgggcagcaacacctggagcttcaagggcatcgctggagctacctacgatgagctggacgaccaagagtcggcaaacatccacgaccacaagggtaacacctacgagttcgttggggatgccaacagcaccacgttcggtagcatggtgtctggcgagtggatcgacaccatggtaggcatcgactggtttgaagctcgcctccgggagcgcctgtggttccgtcagcggaacagcaagaaaatcccgtacaccaagcagggtaccaccatccttgaaacggatgttcgagcacagctccaagagggcattcgagtccaactgttcaccgacaccccggctccccgggtccgtgtacgggatgcaaacagtatgtctccgaatgatcgggctcgccggttctatgacggtatcgagttcgaagctcagctcgctggtgccatccacatcatcggtatccgtggcgtagtcacggcttaaggagtagacaatggcaggccgtacttccacttacgcccctaaccaggttactatcgtaatcaaccacgcggcttcgggtatcagccacaccctgaccggcttcagcgaagacagcattgtctccgttgaacgcctggtggacacgttcaccgagtatgttggtgctgatgacactcacacccgggtgttcaacgccaactccggcgcacgggctaccgtaagcctggcccagacctcggagtcgaacgatgtccttaccttccttcacgagtttgaccgtgaagcgatgtccgcagacggcatgttcgagatgctgatcaaggacaactcgggccgctccctgtacttctcggacgaggcgtacattgcagtgatcccgcagggtggcttcagcaaccagatgaacacccgtgattgggtcatttccatgaccaacaccacgttccaacatggcggcaaccagaaggtgagccccgctaccgcagacaccctcacggctcttggtgtgaacctcgacgcccgctggctgtaagcgacaacctggccgcccctcgtgggcggccttttttgtacctggaggaaatatgaacaccttgacttactctccaagagaggttacgatcctgatcgccggagcccatgaagtgaccggatacgcggagggggagttcgtcacgatccagaaagaggttcaagcgacccagactcagcgagctatggatggatcagtggcccgcctctacactaaggatgacggctaccgaatgaccctcaccttggcacagtcctcgcctacaaacgacttcctgggcgctgtttacaacctggacgcagctacccgcaaggggaagttcccgctggtggtgaaagacaccctgggaaacacaaacttcttcgcaggcactgcctggattgagacccctccgaccgtagggtttgggggtactcttcgagaaaacgtgtggcgattcgcttgctacgacgctaccctccggatcggcgggaacagcgaccttactgacttcgagaactacctgagtcagggcgcagccatccttccaatccttcgacagtacggacttatctgatgacaaagcgtgtgttgacttacgcccccgaggatgttagactgataatctcggagtttgaatgcgtaggtgtagtctcggttgaggttgcctgggacatggaggtctaccgtaaagtggtgggcatccggggtcaggtgacccgagttcgaaacctcaaccagtctgcacgtatgcgagtagagcttcttcagacctcggacacaaacgatgtcttgttcgacatcctgacacaggaccgcgttaaccagtccggcaggctagacctggccctggctgacaacaacggcgataccatcatctacaccaacaacgcctggatttcaggccacccccagacccgtaggagcctggggtttgacaaccctgtgtggacgattgagattgcccgagtaacggaccgtgatctgtctggttcgaacaaccccctagacttcttcagcttcgacgggctgaagacggctgcgggtaatgcaatcaactcggtcttagaccaattctaaaaggagagcccaaatggcacgcaagcaacattccatcgaaatcaacggtgaccgtttcctgatcacctccatgccggctaccactggcctgtctcacctgaagatgctcaccaagcttctcggcccggcccttgcagaggcaggcgtaggctcgaaagagggtgcaggttcgatggacatcgccaccctggtcagcaaggtggttgagcggatcgacgaggttgaggtggaaaagatgatcatcggcatgatgaccagtgtgtccaagaacaacatggaaatcaacttcaacgaggagttctcggctgactttggcaagctgttccagttggtgactgaggtagtgaagctgaacttcggctcggtttttcaagcactcggtttcgacggtcaacagtaagtggggaggggggtgaccagatggtacacccccgcctaaagcggctcatgaaggagttccaaaaggactacgaggtctatcaggtgttgacgcactctctgcgcctggcgagccttcacgagctgcaaacgctgtacgataccgaggatttatatgacctcctagagtaccaggcagctcacgacgaagccgcagacatcgcccgagaaatcgccaagctgaggcaacaagatggcaactgaagagattacaaagctcgtcgggacgatccagtggagggcggataaccgccccctgctgacgttcaagaagaacctggaacaggtcagagaccgcctcaacgaagtggctggcctggccaacaagaaagtgacgatgagggttgaccttgatggtcgaagcctggcagccaagatcaaaatggctaccaatgcccagattcgtctcaagaatgtggacatcgcccaggacaccctgggaacgatggtcaagaagctcagtgagcgactggcaaacactccagtcacgctgagcaatgttcgtttcaacatcaaggatatcgcccaacagaagcgattccttcgcacgtttatgcaaggcttggctctggaaattcccgtctctattcgagcgaggaaggcagagcaagccctgttggcatggaagcggcagactgagcaacgcttcacgcttcacctgaatgccgacatcagtcagtccaagttctaccgaaatgctcgtcggaccatcgacgcagtgattcagaggctaggcactatcactctgcggacgccaaatatcaggctgtcggttgacagggctcacctccggcaagagattgcggatgtcctggcccagattcgccgagaggctagaattagaatcgatttgcaaggccatgtcaaccaggtaaggggcaggaatgcccatgctgtgggaggtatggctggtgctggtgcaggggctgctgtagcccactggggacgaggctttatccctggcctgggaggcgcgtttgccatctcccagatgaaccagatgggtcagcaaatgatcgcccagcagaacgccatggctgcggtaggtggtagccaggaagctggtcaagccactatggcacagttcaagcagatggccaacgaggtcggcttcgactggcgagctgttgcaccttcctacaccaagatgctggcctctggacagggcgccggaatggacaaagatgttgttgacagcatcttccgttccatgacagagtatggtaccgtaatgggcttggataccgagtccatgaaaggttctttgcgcgccgtcgaacagatgatgaacaaagaacaggtgatgtctgaggaactgaagctccagttgggtgaacggttcccggcagctatgagcctcatggcccaggctgtttctgcgaaagaaggcagagagattagcaccaaagaactcggtgatatgatggcgaaggggttggtccgaacggacgtgcttcccgagttcgctcgtatcattgccgagaaggcccgagaaggcggtgcgttgtccagggcgcagaactccactgctgcccaacagcagcgctttaacaacgcctggtcggacgctgtggggctgatctacaacaacggcatgggccagggcatggccaacctgttcaaggagatggctcggacgctgaacgataacgaggaggctgtaaaaggcctgggtgctgcgatggagtggctcctttccccgtttgaggcagccgctatcttgattcgtcagatgctgcaacaactacccgacctggccagcaagctgggactgacatctggacagttgatggctttggctggagctatcggccttgcgctattcccgttggggcagattgccttggctattggcggcctgttcctggtggtcgaggatttcgtcggcttcctgcaagggaaggatagcgtaattggcgacttcttcaaccaactgacgccagagcagcaagctgtgtggctgaagatcggtggggcagtagtccagacagcagaggcggttggtcgcctggctgaagccatgggagagctgctgggagggttcgctgagggtggtatgttctccactgcgctggacttcttcacgtcgaagattctggccgtgctgacagtcatcaccaagctggttcaggctgctgaagccctgaagaataaggattttggcaaggctgcgaagcttgctggagacgccggggccgtagcgctgtcgaacagcccggtaaccatgctcctccgtgatgacctccggcaggaccttgaggcccgagcccgacgtgctcagaatgacatggggcggaacatagatgaagacgttgttcgccgagtccctgagtacctcaaagcggagaacggggtgggtggtatgcccagtgtagggcagattaccctgaacatccccatccagattgagagcgctcctcaaatccaggatgaaaaggagttcagcgagatgcttcaaacccgaatcatggacagcttccatgacactcttcgccaggccatggtggatgcatcggagaacaagaaatgacggtagctattcaacgagagtccggggatatcatctggttcgatgcgattctgaacctgaacatctcccgggctaaccaggtgactcagcacgtggtagaatcgggagcttcggttaccgaccatgtgattgctcagaatcagaagatgaccctttcgggggtcgtctctgacgctgacttcaacctggacaggccagttattacggctgctgacgcacaggctttcgggatcacccctaagccttttgtcaatagtacgccagtgacatcgggccccatcatcaccccgggggcagacacggcctggacgaacttcctcccggagacggtcaaccagttcttggacctggacaggcccaccgtggtggttccagcggctcccaaggagaagggggcaaacctgatccgagaagaactggacaggatcaccagggaccgtgagaggattgtcctgctggacttcgaaggctctgctgtgaggaccatcttccagaacgtggtgatcacctcgatcagcttcaaggaagacccgcagagcggtgagtcgttgtatgtggacctggcatttgaggtgatcaggacaaccaccttccagacggcagccattcccaagaaggtgagcgattcgatcaagaacaaggccagcgagaagcaggccaagggcaagcaagccccgaaagatgagaaggtaacggatgcagacgggaagaacccgaaaggggaaaccgtattgcacaggatgactaaccgggaggtgcgatagtggctatccgagagcgggccaggctggtggagctacccacttaccgagacccacaatacgcctaccaaatgaagctgggggaccaaatccggtacctcagcttttcttggtcggataggcaacgatattggcacatgaccgtagaaaacatggacggagaggttatcattcggaacatgaagttggttccgaactaccctctaggctatgactacggatgggccaggtacgggctgaacgggtattttctagttctccccgacaaccacaagaacgacatctgtgaagatatctctactctcaacgagttcttcgaactgtactacgtggagattgaggaatacgacgatagcgaggaggtgtaaatggaacagttcgaacgggtgtacttgctcaccgttggagattaccggacaggcaagggagtcctgatcaaggatgtacacatgcggttcgacatcagcaagtcggcagacaacaagaagaagtccaacagtgccacggtcgaactgtacaacctctcagcaagcacccgagcaatgcttgatacggactatttgtcggtcaaactggaagtagggtatacggcagccggaacccgggtggtactggagggcaacgtggttgaacgccggactgcccagcagggcccggacatggtgactcagctcatcctgggtgaggggtacaccgacctaaaccacatccggctcaagcagacgattcctccggggcagactgccaaggatgtcattgaagctgctatggggcaactgcccggcgtggtacggggtgttttttcagggaccaatatcaacaaccccgtggtgttcgggtatcccatggacgggagtgcaaaggaaatcttgaacgacatttgcagggacaacaatatggagtggcggtgtgatgcaggcgccctctacgtcaacgatgtcaacgggattcacgacaaaaacatcaagtcggccccggtactgaacgaatctactggcctgatcggtatcccctaccgaacatcctctgaaggtaatcggcagaagggagacaagaggcggacgcaaggtgttcaattcaaagccctgttgaacgccgactttgcccctgggcaagtagtccgtatcgagtcaaaagaagtgacaggctggtatcggatcaactcagccaggtactacgggggctacgatgaccaggaatggtacgttgattgcttctgtggcatcattatcgaggaagacctcagatgattgaactaagtttcagcagcgtggtgaacacgctgatcgagcaacaactgaacaatgtgagaacagctatcccgggaagggtcatccgagtctacaaagaccttgagaccctgatgattgacgctcagcccctggttaaccggctgtacgatgacgggacttcagaggagcagcctaccattctttctgtgcctgtgcaaatgccgggaactcgaaggaccttggtcagcttccccttgttccccggagatgaggttctactggtcttctgcgagcgaggcattgataactttaaagccggtaccgggaaccccaccaagcccacggggtctcgaactttcagtggacgtgatgctgtggctattcctggggtcttccccttcgcagtcagccccaataaccctgcacacaggaagtttcctcacagcacctacgacctggtggtagcacacaacctggccactgcaacggagtgcgaggtgaggctgaaggagaatgggaacatcgaactcctgacggacctagacgtgaacgtcaaggcccggaacatcaccttggaagggtcagaagggattaccctgaacacaccggccctgaaagtccaggcacagaataccacctggacagggaacatcacccactctggaaactacacccagacaggtgtatcgacattcaacggcattccgttccacacccacgtgcatggaggggttatgcctggcggtggtactactgccgtcccacaagcgtgagggattatggaccttctactggatgaaaatagtcacgacatcgtgttcgtgaatgggcagacccctgtgactcaggggcaagttcagattgtagctcaaaggctcaaaatcaagctctggacgttcctgggtgagtggttcttgaacctggacgtaggggtgccctaccgtcaaagaatcctcaccaaggtggcccacaaggcgacggtggacatcatctttcaacgcctcttggctgaggatgagggggtgaaggaaatcctggaatatcgaagcgaatacaacgcgcctgctcggcgcttcaccttagaattcaaagtgcggacttactccaacgaagaagtagccgtgcgactgccgctggaggtataaatggctggattgactgacaaagggctggaaatccggtaccttcctgaggtactggagcagtaccacaaccgagcccaggacatcttctctgacgaagttgaacctggtgatgtagtagataccagtgagaactctaccctgggccgcatgattggcgtagtagccccaagcgtggctgagctgtgggaagccctgcaagaggtgcatgacagtttcaaccccaacgtggcaaccggctacgctctggataacgaagttgctctctcaggtatcatccgatacgctgaagagcccaccagggctcaagtagtgtttgagggtaactacaacatcgtggtcagctcggtgggctctgtatcctccagcgtcaccttgaggcagttccgggtgattaccccggtattgatgaaccttcaacaggcttcaggggtagcctggagggtcacggctgttgaagctggacacgagtataagatcggttactcgacggatggtggcagcaactttgtatatgccacgtacaccgcgacacccacggacactgcaacgtctattcagaccatgctgggtcaaaaggtatctcagtcgtggaccagcttcgaaacacagaccgatgccaagaacaactacaactgggcccgtcgcaggaatcgtctccagattgtccacttcgacctggacccccgcatcaccccaatcaaggtggccaaacccggggtggtagaggatacccaaatgggcccatcgactcaacttccagggacgattgacaccatctcggtgccgatcctgggctgggattcggtgtacaacccgaccaatgccgtatccggcaggttcagggagacggatgtcgaactccgggaacgttggaggaattctaagttctaccaggccgctgccatcttggaagcgatgctggatggcatgcaccaagttcctggggtgcgagatgtgaccatcattgagaatgacaccaacaaccatgactcggtgcataacgttcctccccacgccttcacggtgatcactcatgggggtgacgactctgacatcggcaagatgatttggcagaagaagcctacaggtatccaagccttcggggacacggtggtgcagattgcggactcccagggcaaggttcactccattggattccgcagagccaaagagattgaggtccaggtcaacctaaacatctctgccattgcaggtcaggttcttcccggggatgtaaaggaacaggtcactgctgccatcctggcgtaccaagatgggctggacaaaattggtaaagaggtggtatactctagactatacactccgattaacagcgttccagggttccaggttaacagcttgaccattggaaagaaagggggcacccaggccatggcgaacatccctgtagggtatgacgaggtggctattttcgatgccacccgtattgcaatcacggtgacctgatatgctggaaaagaaccagttccggatgattgactttctgaaagtcgctcaaagccggtacacagagcaattcaagaagaagccgatcttcgataagttcgtagagctgcttcttcaggctcaaattgaactgcaagaggttatgcgccaggtccagcaagagcggaccctggacacagcagtaggggctcaattggacgttctgggggagattgtaggtcttccccggagtcttgtcactgccgagatattcaaattcttcggctacaaagaccgtcctgacaacccaaccccgctaccgaccccgggcaacgctggaccttacggttccttgaacgacccttcagtcggggcaccttggtgggggttggggcaagctactgagatttcccgggaggcaacggacgaagagtaccgcctgatgatcaaggcgaagattctgaagaaccggacgctatctaccccggaggatgtgatcgaagcctacaagttcctgtttggggctagccagatcatcatcgacgaactgggaaacgccaactgccgtatcggcatcgggaagattctttctaccgtggaaagaggtttgctgttcgagctgggcaacgtggccagcctgttgccgaagaccttgggtgtgaactacacctattcggaattctctgctgaccgcccgtttgccaccgaaggcttccagggaggttttggcacaggtgacctgaacgacccctcggtaggtggtattctgtcgaaccttctaacgtaagagagcaaaatggccaatatcaacaagatcagtatgaacctgatttggggcgtctctggtgatatcaccgccccaggtccggaaaagatgaacaagggctgggaggtggaggtagttccccggcaatggttgaactacctgcaaaaccggttggacaccaacgtggcctacctgctccagaagggcttgcctgagtgggacagtgagaccgagtatcaggcaaacacctcctatgtacaacgcaacggtgtagtgtacaaggcctctcggacaaataccaacagtgagcctggcacgactgcgggaaacaccaactggaaccgggctttccaagagtggtctccagctctggagtccttgacggcgcttaccccaactgcgtggagattcccgttctacaacgcttcaggacaagcaaccctgggtggaatcacctcctacactgtagggcttatgggccttagctccgatgtagcctggcgggcagagctgaaagctcaagcgagtgcttcccagctcacgtggctgtccaacctggcacctgtagctggagctatcccgtatttcaatacggctacctccatggccaacctggcaacgaccccgtttggtcgcaactggattggcgtagcagacgcagcaacgggtaggtcgcagcttcaacttggcaacgcttctaccatgacggccacggccatcaatcaggctagcacagttgtttcccgagattccacagggactgccgctatcggtacggtaattggaagcctgacggggaatgcaacttctgcgacccgtttgcagacaggtcggaggattaacggggttgttttcgatggcacccaggatatcaacctacccccgctgactcctgattatgcaggggtggtggccaggctgcacatcaatggtgctgggatgacggggagtgataagactacccaactggcgttgagaaacatctcggacaacaactggattagtcttgctgtattggatgataaaactctccagtttgcgttccgggatcaaacggacccatctgtaaggattggcaataacccgatctttcacgcagggaaccagtttgacctgggaccctccaggaactcggcgagagagaacctgggacttgacagattcagccaaagttccaccgattctaacgtgttttccagtctgggggctaatggtccttatcttgtggctcaacctacggcagtaggggggttcaacaacgctacaggggcgtggatgttccggtttgaccagacagggacgatgactcacggtaccgtaccggttgcgagggtatcagggctggccaactcggctcaaatccccgccgtaaccactgcccagtccaactccctagttcagagggatgcaaacggaagcttcagcgcaacaggcatcaatgcctatgggaccatcatcgggtacggctcgaacatcttcagccgctcttctggaacagggaatgcccatatcggcttccagaaagcggacggtagtgagttgggtctgatttggggtgccccatccaacgggtctatgaatttccggactctggggggctcaacaggtatgactctgacaggtcaagacttgactgtagtcggaagggtcaacgcaaccacgctgaacgcctctggcaacgtgaatgcaacagggaacgttagcgccggccaagctattctcaacaccgcagggaacattacgggagccgcttacggcacctacggctctcttaccaactgggtggattcggtatatgccaagaagggtgagattcctaacgatattgcccgagctggagcagcctgggacgccgtagggcagtacatcctggcaggagaccagtcaggcgggtcgggaggacctggcaccattagggcagggagccaactgaaaccgtactctaccatcagttacaccgcaggggcagttccggcagccgggcagtaccgttgcatgggagcgtttgcagggggtggtaaccagatcaccctgtggcaacgcatttcctaaacaaacaaggggcttcggccccttacttctacctggaaggtgaggatgaaattcagaaacgttgtaaagtataagatggggtatgagtgtgagattaaacacccggaatgggggtggtcaccgtacttcgcctgcgactacgacgagaatgctaaaaagatttatgacgccattgtgtctgccattgaggcgggtgacatcccagtcccggaagatgtgtctgaccgggatttggtcattgatgcccgtaactggagagataatgaactacgagatgcagatcgtcaagtagaaatggccatagacgatgaagatgcggtcaaagagaaggcctggcgaaagtatcgctcagctctgagaaagtggcctgaaaaggcgggattcccttccgcaaagagccgcccgcgccgccccaagaattgaggaaagattatgccgcttccaaaacctgacgacctgtccgtaatctgggcatctattgggcaggcgactaagcctgctccaaacaagatcatgacaggctggaccaacgaaatccctccctaccaatggcacaactggtatttccagagggtagataaggccctggcccacatcaaccaacaaggcatcgccatgtgggatgccgccaccacttacgaagggggtaccagcctggccaaagggtcagatggggtggtgtacaaggccaaacggtccagccgaggtgttgaccccgtatctccggcaagcaacctggactgggaacccgcattcgagaggtacggtgaggctgcgaaagtaaattcccagcttcaatccttgaaaaaggattatgaaacactggccaatatcagcaacattgccatggccaggcaaaacctctcggtatattccaaagccgagacagatgtccgatacgccttcaaggctggggcagccgggcaggtgtttgctgtagcccccgccacagcaggaagccatgcagtcccaagggatcagttgccagccttgtacccccgagctggagcagcaccaggcatcatcgctttggcaagccaggcggaaggatacgcaggcaccgttgagaacaaggcgattgcaccgagtgtcctgaaagcactcaccctgtataagagccagaatctggcggacctcccggataagcagcttgcccgggcgaacctggggctggccagctctgctgtgctgccggagaacacctggctcaagcgtaatgacaacctggcggatgttcccaacaaagccgcagcacgggctaacctggggatcacgtcttcagcgctcctccctgagagcacctggttgaagactgctagcaacctggctgatatccccaacaagcccacagcccggtctaacctggggctcacagacactgctacactgcctgtaggcgacgtaatgcgcaagagtgagaacctggcagggttgaccaacgtccctcaagcacgggctaacctgggtttgggaactatggcaactgccaactcgggagacttcctaacctcggcgaacaaccttggagatgtcagggatgcacaagcagcccggaacaacctgggcttgaaaggatgtgctaccttggatgccctggggcttcccacaggagccacaggcctggacttccaatcggaacagtcctccagcgcatccggctgggcagctcttccgaacgggttgatccttcagtggggtcaaggccctgcactgtacgatgatcggtctacgattgtccggctgccacgccaggctcgaatcctgaacgtgagcgtaactgtgatgggcactttcaacgcctctatcgggccaggcgcctacatgacggaccagtggagtaatactcagttccgtgtatcgtgcaactggggcaactgggcgtatccgttctgctggttcgctatcaccaccatctacgggatgtagtatgatcaccgacagagagtatcagcaagctgctgagatgttgggagtagatgtcccagcgatcaaggcagtgaccaaggtggaggccccggtagggggcttccagcctacaggagagccaacgatcctctacgagcgtcaccagatgtaccgacagctccaggccaaaggtctccccacggaaggtcatcccccagacctggtaaataaggtagctggtgggtatggaaaatacagcgagcaacacgctaaactggcccgcgccgtaaagatcgacagggacagcgccctggagtcctgctcctggggaatgttccagatcatgggctaccactggaagctgatggggtaccctacccttcaagctttcgtaaacgccatgtacgccagcgaaggagcccagatggacgccttctgccggttcatcaaggcacaacccaccacgcatgctgccttgaaagcccatgattgggccaagtttgccagactgtacaacggtccaggctacgccaagaacaagtatgacgtgaaattggagaaagcatatgctgaagctagtggctgaaaaggccaagctgcaccgtagcagtacagtggtgctgagcatcttcctcttcatcctctcgatgctgatcatcttcgagccgctgatcccagggcttgcaggtgttctcggtcccgacctgtaccccaaggtcgtggcaggcgtctccatgctgattgcagcaggccggtacatcgtccaaacctccctccggggcatggtagttcaagtatcggatgagattcccaaggaggaagaggaaaaatgaaactgatgactgccatgcggatagcgttggtagtcctcgttctggggctctcctggcttctccgggagagtcatcagaaaatcgacaggctggagcagagcctggcttctctggaggccagctacgcagaagcatcggcatcgtaccgatccttccgaaagcaatgtctgtccgtgttctcgatgaacgaggaactggtgattcaaaacaagaccctggaggcctctgtgggctccgtggtgcaacgtttggatcggacccctacactgaccctacccgaggtgaaagatgcgcctacgagcgttcctgggcatgtggctactgagcgtctctctcctgggactatggagttgctcaacgaagccttctgtgccgcagcccccgcaggtcatcctgcctgtactcccaaatgagtggacaaccccctgtgtaatctttccggtggaagaggacactgtaaaggccttggccaaggggtacgtcctgaacactggtgcagcaggttgcgccaacaacaaactccacttcatccagcagtggtacaaagacctggaggcccagtatggcagccgcacgcagtaacaacgaagactcccagtggaagtatgtactggacctggcagcaaagttcctcctacccctgctgatggcatgggccacctggcaacagacgcagatcggtaaggtggaggataggctgtatgccctccaagctgttgctgtgaccgagcaaaaactggttgccacggaaagccgtatcctgaactacctggatgttcggctaggggacctggacaagaagatggaggtcaatcagaaatactccgaaatgatcatccagatgatgaagcaggagcggtaaacgagaggtgtcctcatgacgaaggcccacgaaatcaccgtcctggggatgctcttcgctacactgctgactctggtggtcggtttgggagttctggtctactacgctcaacgggtgaccagcaccgagtaccagttcgacatcatccggaaggagtaccggctcagcctggaagagatgcggcgagacttcgatatccgaacaaacagactgcaagagcaaatcaatgccatgcagtataccacgtctaagcagatgcggctgcttcaagaagagcaggacaacctcaagcggaaaagatgagccccactggccacaagctggtggggctttttcacgcccggagaaaagtagttgacatcccccacaacaccctatacagtggccacatcaacagcttgaggaggttccatggataaggtttacatcgacgcaacatttgacattgaatcggtgatcgccgagccggatgggatagtgtactcggactaccacaaagggactcccttaggagtaaccgccactctccgtgtgaacatgcccaaacgggattccaacagggtgtggaagactctcttggccatggatttctcggccctggagcagcgtgtattggcagccatgctgacttctggagggttggttatgcttctagaggatggtaagctgtacgatcagaacggcgcccaggtagaggacccccgtgataagctcgtggtgatcttcgatgagtgggacaagctttccaaaaatcagcgccacctgcgcgccaagaagcaccgtacagcccccaagaaccctcaactgcgaaagaatcactggaaccgttgacacaggaatataaaggaggaacaatgaagaacagtacagcagccctcggactggcatgtgcgctggcaacaatgctcaccctgccatccccgtaccctgctacgctgaacagccggtgggaggttgaagtcccggcccaggaggaatcgaccgacaagaagaaggccaagaaaaagaaactgaaggcccttcaagctgaagctgttaagtcgcgtaagggaggtaagaagtgactaaaccgctcgatccgcctccgacagtggagtatattcgaacgactcggaaggcccctccaccgcctcctccaagccctgctgtgaggtgggtgaaagaagggacgactttggatgaactagcgagggatttgaaattgcaacatatgaaagcatggtctgtcgtggttttagcagttatcctggcactcaccatgatgttttccttcctgggcatgatgcagcgcttggaagagaaccaagtgaagctcgaatctgagaaggtgcaagccgtgaaagaggcaatcaccaaatgcgaggcgggagctggagtgttggaagtgactctgaaaggagaccggctgactttctacacttgcaagttctcgaagtagctgttatgattccagacctcaaggaggcttaccagaaagcctccaagaggactaagctgttgatactggcggccttggttagccaagcagcgatagccctctacgaacaagatcgaaggtctttaaaagacccccacctgtccaggatgtgtttcgtacaacaaggggtttttgaagttacccgaacaggccctatcacccgcatctattgcaagaaaggagagtaaagatggtaattttcaccaaagaacgaaacaacttggccaatagcgcaatgatcgctatcaaccccaaacacgtcaccgggctggaaatccctgcgtcgaaggaagaagtccgagtaggcctcacaagcgggattattatcctgagcttcctcacagcccaagatgccaaacaagccttcgaaactctgactttcgcctgctaaggaggtaccaatggaactcgacatccgccaacccaaccctcccttcgataccatccggattgcggatatcagcgacgatatgagcaatgtgtgcctgatcacgtgcaaagaggcccctcccggagctgtgcgcttggtgtaccccgatgaaggacaagctacatttggaatgccgggagatatcgtgcaacaagagcttctggtggaggacaagatgcacgccgacttccttatcaaggcgctggaaaaggctatcgagttggggtggctgaagtgatgggactgccgatctacctgagcgttagcgtctaccacttggcaggccttatcgcagtcgcctgcctggtctactggggtatcatcaagatgacccggagcgaggttgaacgaggaaacatgaccaagccgcaagcgtcctggtggcgtaagtggtaccccgtgtgggctatcgtctgcatctcggtatcgtgcctgggcttcggctacaaggtggaagagattcgcccggtgggcacgttccaatcccatcccacaactgttgacacaggggagaaggaggagtatcgttcataccgtgaaaaggcagaagagcggttcaacaagaccctcgaagccatcgaaacgaaaaacaacctgaagtaaggaggaaagatgttcaagaacctgatgcgtggcgtcgccattgtcctggccctggccctggttgcaggctgctcggatgtggtaccgcctgccatgaaaggcaagcacctcagcggtagtggctacagcaccaacgtcctcgaacctggccgtcactggcgtgccccgtggactcgtatcgtgatgctggatgtctccacccagaccgtcgccgagcccctgaaagtgaagatggccgacaatctggacctgacgttcgtggtacgcttccgtactcgaatcgccggcaccgagcgcaccatcaatgccatgttcaacgatatccgggtggagaatgaccgagtaactctccagcaggtgtatggtgtctacggtaaggatgtggtacaacgtgtcagccgctcggtcctgggcaagtaccgcacccaggatgtagcagccaacttcgacgagattaaccaagccctgcactcccaactggtagcagcaatggagggtagccctttggaggtgagcaacatcaccttggctgacctgcaatacccggaagtgatcacgaaggctatcgaagctcagaacgagcgggagctggctatcaagaccgccgaaaacgaacaggctatcgagatggtcaagcgtgagaacgccctgaagctggcccaggcggatcgtgaaatcgaactgaccaaggcacgtaccctggccgaccagaacgaaatcaccaaccgaggcctgtcggagcgactgctccagtacaaggcgctggaagttcagatggaaatgaccaagaactcctctgcggtgttcgtaccctatgaggctatgaccagccccggcttccagaaccgcgtctacaagtgaccaacaggggccagccaggctggccccatttcttttgaaggaggatgcatggaacataaagcgttggaaggtgttaaacacagaacgtgggaagtggtggatagcgagtttgacggagtttacatccgagaagccctccctaaagtgaggggtggatacctgatcgagtacgtgattgcctctgatgttaaggaagagcatgctgctaccctgtgtgctgcccgggagatgaaagcggagctggagcgtctgtgtcggatgagtgagtccagccttatccttttgggctgggaagaaaaggacattaagagcgtcctcgctcccgcaaaagaagccctggccttggccaacaaaaactgggagaagtaagatggacgtgatggacgacgattttgagtgccctgatatcctcccggagtgggctgaagagtttcacccctcggaaggaaagcaccagataggggcccagttggcgactaaggatggacgagtaactgggaatggggtgatcttctgtgctgtgccgtggaaattctaccctaagcttgacctgttccttgtggtaacggatgcaggaaacgttctcaagttgaccgaggccgagttgcacagcctcttccattggccacaatatatcgccgacctcaaccagaagacgccggctgaggtgatgtacaccgtcaaaacaggtccaatcggggaccttattcaagatttccaggaggaaaacggacatgcgtaaactatcttcaattcgtcaagtgtcaggtatcgaacccatcgagggtgcagaccggatcgagaaggccttcttcgggggctggaccaccatcgtcccaaaaggcgtgctgtcccccggcgacctggcagtctactttgagattgacagccttctacctgtggcagacccggcgttctcccaccttaccaagaacctggtgaaggttacccggaagaaagaagcctgctccctgggtatggattgtgagatggcaggagtgtgttatgccgtgtcgcaaggctgccccagcgagtgtggaggcgaagaggaggtggtatactcccgactgcggaccatgaaaatgcgaggtgtcacctcacaaggcttggcccttcctctacgagccttcccaggccgcctggcccagttggaagctggcatccttcgccggctccagaaagcgcccgtgcaagaggtgttggacgatctgaacgagaagatgccgctggatgaaatgctcggtgtgctgaagtacgagaaacctgaagaggtggcggcagggaacagtaatgtctcccgtgtcagcacgttccctcgatacatcccgaagacggaccaggaacgggttcagaacatccctctggagaagatcatcgcagatgggccgtaccaggtgaccgtcaagatggatggctccagttgcactgtgtgggtaaatgaagacggtgttggcatggcaagccggaatcaaaccctggtggagcctacctggactgatttccccagtttcgaggattgcaaccactttggccaggctgtactggatcaggacattcctcgcaagttggcagagttctatgaactcagcaaacagccgttcgcaattcaaggcgaggtgtgtggcccggctatccagggcaacaaggagaaactggagaaacccaccttcttcttgttcagtgtcttcaacatcaaggagggtgcctacgagtccccagagtattgcaggatgctggcggaaactctcgatattaagcatgtgcctgtgctctcgactcagcatgtgtttgaagatgtcacttatgccgacatccttgccatggctgaaggtaagagctataatcctgccaccaacagggaaggccttgttttcacagcggtagacaagaaccgctacggtcactacccccatttcaaagctatcagccaatcttggctggcgaaacacgagtaaggagagtccatgcagtcgcagttccaaaacatcctgaaatccctggaaatcgctcgtcagattcgggatgacgaagagttcgcccggctggtcgagctgggcatggttcaggcggacatcatgaatgagtcgttctactgggttgacatgcagggccgtttcaggcagtatactcctcacggcttcgaacactgatcaacatggcccggctagtccgggccttacaggaggaaacatgagcgaaatcaacttttatcccgtatctgctgagaatatttaccccggcctgacccaggcggcaaagatcgtcctgctgatggttctgcctgagcttcgaggaatcatctgcccagacacaggtgaacgtctgcgggagggcttgggaatgcatggtatcctggagtgcgtatgggaaagccgccacaaggttcatgccatggaccagtgggccaacttcatgcaagggtacaagtccgaaatgccgggctccagcgacatgtatgaccaaattcaacgagtgttgccttcccggaacatgctgaaacaaatgatcttaccgtacctggaggcttgcaaacgtcaaacccgcgaagagcgtattgcacaggagaagtaccatgagcaaatttgaaatgcttgacctggtgtgcattcatccggacccggaagtgtctgggagcaagggcacgctattcggggaattccgggagaaaggtgccatcggtatcgtgttctacatcccccacgggatcagcacaaccggcaaggttaagaacctctgcaatgaaaaaggatacgggatcgtctggcatgttgacggacgccttcgcgttatgtacgccgtaccaggggattttctggtaccctacaatggcctgcgccaggaggatgatttcccgtggtctgaactccctcttcctggggaagtcatcctcttccgagaagaggagtatgtggatggggtaggaggtagtgccaataaagtccagtatgacaccgtttcaactggggctgtgttcggttactccccggacatgaaatttctgctggtgtcggtactccctcacggggatgaagaggaggtctctgtagaaaacgtgatcggactgagactgtccatcacagaccggatgccggaggagggatatcaataatggcaaagctgaagctggatggtaatatcctcaccgtaatgggcctcacggcaggccaggcagtcgagaaggtgaagcaacgtatccgaatggatgttgactttacccaggtaactgtggtacagtctggtcctggagtcttccaagtctcttaccctttgaacaagggcgagcgtggaagctacaagcacctctatgacaagcaggagaaggagcgtaaggcgaacaacccgcctcccgagccaccacccctcctgctggcgtaaccctcagggccctccgtgggccctttttattgcagaaggagtaggaagtgctgattgggaagttcgcctgtgtcctgccaggatgtgatagcagcgacgctatggcggtctacgaggacgagccgggggtcttcggtggacgctgtttcagttgtgatcgaatggtttcgaacaacaccctggcaaggtctcccctgggggaagagttgggagcagtgatcatcaaaggtgatcgacgtgcccaggcccagaggaggaaagaggagaaagaagtgagagagattcaacgcaagcccgtcatcactgccgaagaccgggagaaaatccaaggcaacggcggggctgacacgaccctgttccggggcatagcccggcagaccaacgagaagtacgggtgtatcacacactacgcagacaacgagcctgtggtgcgatattatccgatccatgaccacggtgagctggtaggatacaaggttcgtcaggttcccaagtccttctatgccatcggtcggaacgacaaacactgcgagctttatggtcaacacctgttccctgccggaggcaaatacctcctcattgtaggcggagaggaggatgctcatgcagcttaccagatgctccgagttgatcagctccagcgctggaagaagaagaacccttacgcggacatcgcagatgcaccgttgccgtatccagtcgtaagtccgactgtgggtgaaacctcggcagccagccagttggctgccaactatgagtacatcaactctttcgacgaaatcatcctcatgttcgacgcggatgagaagggagagcagggtgctcaggcggcgctggaagtgctgcccatggggaaggtacggattgccaacctcccagggaaggaccccaacaagatgttggaggacaagcaggccaaggcgttcatcaatgccttcttcgacgcccgcaaggcatccccggcaggcatcgtggggtcgggtcagattcgagaggctatgcttaacaaggcaatggcgcctaagctgcccctgccctcgttcctgtacgagctgtctcggaagaccgctggaggtttcccgctgaactccatcgtcaacctgatcgcaggctccggcatcggtaagaccacctgggtcaacgaactggtgtaccattggattttcaacagtccttacaagatgggcatcgtcaccctggaggccgacatcgcagagtacgggggctacctgctgtcccggcacctgggacagaagctggccctgatcgaggaccctcaggagtacctggcaacaatcgaatctgacagggtagagcaggcgagtaacgagctgttcctcaacgctgatgggtctgaccggttcctgctggtggatgatcggggggaccacgatgcgatcaagcagaagattgagcagatgatcatttcggggggcatccaggtgatcgtccttgacccaatgtccgacctgatcgacgggatggacacaggtgaacaggcgttgttcatgaagtggcagaagcagatggtgaaggcttacgatgtaatcttcatcaacgtcaaccacacccgtaagggcaaggacaacaagactgctgcaagccggggcgctgagctgagcgaggaagacatcattggctcctcgaccatctacaagtcgggcaacatcaacatcaccctggtgcgaaacaagcacgcggaggacgatttggaacggaacaccaccctggtgacccttaccaaatgccgccacacagggtacaccgggccagcggggagggtcctgtacaacatcaagacacacaccttgatttccctgacggacttcctcaaccagcaggtggaggagtacaaccaggtacatggagagtctgaggggttagagcaataccctgaagcagaatgtgtcgagcaagttcattcgccggaagatgtggctcccgtctaccctcagttggacggcccgccgccgaccggggacgatgatatcccgttctaagacggatgaaaggaggagtaacgtggaagaggtacagaaacgccgggtagtattcgatatcgaggctaccgggctgatcggagaggggacggtggattacaccgcctcaccctggcgcctgaaagaggatttcaagctacactgtgctgtagctcgggacattgacaccgacgaggtgttcaagtggggtcctgacgaggtgatggacttcgccaaatggctgggtgaggagtgctcggtcgtaattggccacaacattatcaactacgacttgctggctctgaagctgacatgcgggctggagtacaccatcgggtggggagagaccaaggacaccatcaacggtaaccccgtcaagatcgtggacaccctggtaatctccaaaacccttaaccctgaccgtcgccctggccacggcattggggcttggggtgacaagctgggcctggccaagatcgattggcgtgcgaaggctgtcgaactgggattgattaccgagaacgcccctcgtggtgcagagttcaagacgtatcacccggagatgctggagtacaacgtccgagacgtggatgtcaacctgctggtctacaaagctctgatggcagagtggggtgcatggaactgggctccggcagtccagaccgaaagctacgtggcttgggtggtgacccgtcaaagtcacagggggttcttcttcgacgagcgcctggcccaggccaacgtccgggagctggatcaactgatggaggagtgtcgtgccattgttgaaccgatccttcccccgaagaagccgaccaagacggaagctgccaagtattgcttcccgaagacccaggagaagaagatcaagggcggtctgggactctccagcaacatggagaagttcctggagaagatgggcggtaagcaccttccacgttcggggccggatgctcccaactacgtggaaatcaacggcaggacgtatggcctaccgttcgatcatacggtaagcttgcttaccgaggtgcctgccaagatcagcgatacaacccacatcaagggttggctggtggatatgggatgggacccgacttcgtggaaggagcgtgatctttcgtcggatcagaagacaaaggcccagctacctttcgagaagttcgaaaaggtggtgacctcgtacatcgagcaaacctatgcaagcccgttcaagaagtaccgcctggagcacctgaaagagaagctgcgtgctaagtggtccctggccttcatgatggacaacccagacatcgttctggagtacatcctggagcgaggcaatgaccggcagttgaaggtgtggaccaacccggagttcaccgtaggtcaggacaaggacctctgtcccgccctggaacgaatctccgagaagttccctcacgttcggcacgtgaccaactacctgacgtatcgccatcgtcggaactcgatcctaggtggtgggtatgacccggacgacctggacgaagacggcatgcctgtcaaggggtacatggcctaccagcgtgaagatggtcggattgcaactccggcagacagttgtggtgctggtaccagccggttcaaacacaagcaggtggccaacattcctcgtgtgacctcgctgtacggggtaccgatgcgaaacctgttcggcgtggacaccaacaagtgttggcagattggctacgactttgactccctggaagcgaagatcgaagcccactactgcctgagcacggcaatgcgtctcagccctgctgcggcacagaagctcaagatcaagtttgggtccaacttcgccaagtaccgggaagcgtgcatccaggcagcgcaagagtatgcggtagcgcttgtggctgagaagcccaacgatattcacacggtgacggcggcgaagatttccaccatcatcggaggagacttcagtcgtaccaatgccaagtcggtcaagtatggctgctcctacggggctcaggtggctcgtgtagcgaagatcgtcggctgctctatgcaggaggcccaggccatcttcgacgccttctgggaggctgctagcccccttgcgctgctgaagacggttctcaccgacttctggaaggagaaggggaacaagaagttcatcgttgggatcgatggccgccagattcctacccgttcggagcatgctctggtcaacagcctgttccaatcggcaggtgttatctgcgccaaggtggcgatgatcatgcacgaccagaagctgatggctgaaggtctgctggtagacttctggaaggacgactggaagaacaagtcgtactgccagcagctcatcgcttaccacgatgagagccagttggaagtgaccaaggatttggtcaagttcaagatgttctccaaggaagccttgggctggcaagagatgcagcacgaggacccagaggagcagaagaagcttcagaagaaggaagacgctcgatgcaaggccctggtccagcagtggaaggacgagatggaagagtcctcgggtcaaatctggagcgacatcggagagtccccgaagggcggttggttcgtaggctacagtcgggcaggggagacggctatcgaggctgtcaaagctgctggtgagcacttcaagctacgagtagacctgtccgcagggtacatgttgggaaccacgtggggcacctgccactaaggtgcctggaggaaatatgagcaagaaaggtaatagcgaaccgacagggatggcgatcctggattacgtgaacatgcgtcaccaggaattggaagacttcctcctgtactgggtagagaaccatgccaaggggaagaactttcctttggagatgcccaacgacgcggagtggtttgaacacgaactagcctacctgacggtggaaggtatccgagaggcttgacattgcctctggattgtgcttcaataggctcctcgctgcaacaatgcgcggggagctagcaacctgaagtatgtgagtttttgataaaagtccttgactttcaatagcttatatgcttcaatagcgttccaaatgaggaggacatcatgtctattcaagtagaggagaccaccgaatatgtggtctgcaacaagtacaacctgaccagccggtcctacgccttcagcctccgggaagacgcccggaagatgaaagctcaactgggtggcaagcagctagggtggatcatcgagcgaattactcgcaagattgtcaccgaagaagttcgctaacaagcgacaaaccccccgattaggggcaactaccgcccgatagggtaattgataggagaagtaaaacatggcactgcgtcccaaaagcactggcaacaccggcaccccgcgtgagttcgtcaacctccccgagccgaccccgggcaaccacgaagcccgcgtctcgctgatcgtctacctgggcgagcaaaaccgggaagacttcgttgatgagaacggtgagagcaaagctcagaagcctgtggatcaggtggcagtattcgccgacctggtggaagaagtagtggactacggtggtgacatcggtgagcaacagtaccgcctgatgctgaacaagtccttccgtggtgaagtgagtggtatcaccctccaggcgaccccgccacgtgacggcgaaggccgtatcgtcgaaggtggcatctggacctaccacccgaacagcccgctgaccaagctggcgaaagcaatgcaaccgggtgcagcaaccgcgatcctggacggtaccgacctggatatcgagccgctgctgaaccaaccgttcatgtgtactgtgaacgtcaagaagaccccggcgaagaacgacaagaaggacaaggacggcaacccgctcgtctataccaacgtcagcttcggtggcgcgacccaggtcccggccaagatgatgcgtgcaggtgtagctgagcttcgtcagaagcctctcctgatcgacttcgacaacgtgactatcgagaccgcccgcctgctccgccgcgatgtgattcgcaagattcagcaggctaacaacctggctggcacccgtatggaagccgttctccgtgaactggccaaggaacgcggcgacaaggcaccggaagccaaagaagctcccgcaccgcgccccgtagcaacccagcagagcgctcctccggctcagggtcctgcttcggacgtggacagcttcgacgacgatattccgttctaagacggaaccctcagggcccttcggggccctttcttttactccaaaggaggagatgagaatggaagattacgtggtgatcaagtgccgcgttcacactggtttcgcagggggcatccatgaagatgaagaacacctgccacgagacgagtgggaagagatgtcagagaaagagagggaggggttcctggatcggttcgcccaggacatggtaagcaactacatcgatgcccacgcgtgggtggaggaagagtaaatggcacagaacaacactctcgttgtgaatgaccagcacaacgtcttcgtcctacggctgccgcaggcctattttggccatgacattccggtagccatgaaagaggatttccagtattggaaagagcagctacatcttattgctcaaggctccaaaagcacgctgatgattcccagcacaactgacccggaatctcgtcagccgctgttcgacttccaaatcctgcctcggaaaactgagcaggtttcccccagcaccatcaacatccagaactgaaggagagaatcatggaaaactacaacgacgcacgtgaaggtcagatgaccgagaaggacctgttcgaccgcctggtgaccctgcaccgtgaaaagctgaccaacgccgaagaccgttcgcagctcaagaaggatgccaaggagcacggcctggacaaggaccgtatcaagctgatcgacaaggcagcagcccacgacgcgaagcgcgacttcgaggagaaagactatgagttctcccagcttcgtcaggtttacgaggaactctcggaggacgcataatgtcccaaccggcagatacaattgccgtaatcgacggtgacgagtgggcctttaaggcctgctctgccgcagaggggcgtgctatcatagcgaagcacatccccagcggtagggagaaggagttcaaccatcgcacggaattccgagacttcctgaagacccagcacggtgggaagttcactgaggatcagttcgaaattcgggatgtccagtacccggaacccatcgagaacgtcctgttcaccctcaagcagatgattgccggggtgtgtgctgaggtgaatgccacgggctaccaggttctgatttcgggcccggacaacttccgactcgacatcgaccttcccaagcgctaccgcacccctcccaacaagcgagcgccgaacggcactgagaaggcgggacgctacaaagagtcccggggggattccctccgtccggtacacttgagcgacgccaagaagtacctgatcaaaaagcatggggcactgaccacttatcgctgcgaggccgacgatgctcttgcaacccgagggtacgccgggcgtattgccgagctgaagggtgctgctcagtggatcatcccctgcacacaggacaaggatgcgatgggtgtggagagtcgtctctacaaccccaacaagcctggcctgggcatcatggataacagggggtttggccagctcgtcgagatgggtaaggatatcaaggggcatggtcggatgtggctgtacttccagattctcctgggagacagtacggacaactacaacccccgtgacatcctggagtgggccacctaccaggccggaggcactccaaagccctttggggagaagaaggtctactctgtcctgaaggattgccaggacgaccgggatgcctggaaggcaatgtacgaccaatacaagctctggtatccggaggaagtggagtacgttagctggaccgacgaggttatgcgaaaggacgccattgacatcatgcagatgtacgtggactgcgcccacatgcagcgttgggaaaacgaccgaatcaatgtccggcagacgctggagaaaatgggagtgatagaatgcagcaagtaagccttacagattggctggaagagttggacctggttctcgaaagtcgcggcctgccgtcagcccatgcgtacttcctggaaggcctgtacggggactactatgaccaaggcctgactcccgaggaggcagtcgaagaggagttcggctgatggagacggtcaccgagaaaggcaagttgtgggggtggttcccccacctgtacttcgttcgggcgggtgtcatctgcgtgatccaactaggacccctgaagctgtccaaggtgggggctatctacggcatgggcctgttcaaccggctgttgttccagtggggtgggagatgagtgttcgtcgccgaccctgggaagagcttccagaggtttggaagactgaggcttcattcctgtcctggctgcgaggaggtatccgtcgcgccatgtggatgaggcacccggtcaagctggagttcatcaagaacaactctgtggagatggtgaacaccaacccgagaagcatgaagcggttcccaaccgtaaaaggcgcccagtgctccaaatgtggggaggtgaagcgtgcagcggacatggaagtcgatcaccggacaggggagttcagtcttcgatctattgaggacctgcaaaggttcatcgaaggtgtggtgctggtaggtatggatgacctggcatggctttgtaagccgtgccatgaaatcaagactcacatggagcggcaaggtttccatacctggggagaagcccaggctgacaaggaagccatcgccattggcaagaaaggcgtgaatgttgtcaaggcatggctgaaagagcgaggggtagagcctggcaccacagcggctaagcgtcgggatcaaatcttcgccatcctgaaggaggagtacaagtgacccaacggtgcatgttccggcaggatgattcctgccactggtacctggtcccggaagcagagtgcaggcggttcgatgagctgtgtgccctgatcaccggggaattagagccggactcggaagagtggtttgacgccatctgcgagttcgacaacagctatggccacctccgttgtggtcacccgtccaattacgtcatcacggcgcactaaggagatttcatgaaaccgtggcacaataccgctctagaactggcagcagccgggaagtcctggcgtcagattgccgtggagctgggcatggccaagtccactgtgagcgacttcctacgaactcagaagatcaacgagaacaagccgatgcccaaggtgctgatcctcgacatcgagacggctccggctatcggctattactggagccgctggaagaccacagtgggccagaaccaggtgttgcaagaaggttatttgctcaccttctcggccaagtggctgggcagcgatgatatcctggagtgcaagcttccggatttcgacctgtacaacaccgagccgaagaatgaccgagagcttctcaaggtcctggcaggcctgctggatgaggcagacttcgtggtggcgcacaatggccgcaagttcgacctgccgacgatcaatgctcacctggtgaagcacgatatcttgcctcccagcccgtacaagatcatcgacacgtgcgacattgccaagaaggtgttcaagttcccgagcaactctctgaagtccctggcgattttcctgaagtgtcagcacgataagcttgatactggcggtttcgagctgtgggcgagagtcatggatggagaccccgaggcttgggaccacatgatggagtacaacgtcttcgacgtgattgtcctggaggaggtttacttgaagctgcgtgcgtggtataatacccacccgtcgctctctgcgttgatccctcagaaggtcactccccattgccctgtgtgctgctcggacgacttgcgtccaacgggcaaactgtactacaccgcagtgtcggccttcgaggttctccgctgccatagttgtgggaagcactcccgcactcgtcagaatgtcttggaccgggaacacctggtagtcggcatctgattcaaagcccaccttcgggtgggctctttcatatctacaaggagaattcacgcatgatcatgagcgatctgctcgacgccccagagaagcccgaaaccaccgagatggaagtgtccatcgatcaggagctgggggctgacctactgatgtggttggaaaagaactaccctgacaccccgatgatcactgtgtatgtcactctgctggctgccacgcagatgattgccgaaacgatgaaggtggcatccacctccctggacgaaggagtcaagctgtgaaactgggaccctctgtaatgatcactgccagcgagtatgtcgcttccaaagaagcggcagagatgttcaaaacccttggaagcccgtctggatgggtaaaccctgtagccccttccgaagatgagggggaacacacgggaggttcttccagctactaccaagtggaggtgcgtaatcccacctctggcggagaaccgtacatcggggagtgcaacgattttatcgaggcactagacatgaccttcgccgaagcgaacgtgttcaaggcaatctggcgaaaagcagccgagcgcaccctgggtaagaaaaagaagggcaacaacgctgtctatgatgccgagaagatggtattcttctctcaacgggagctgattcagacccgtgccaaagcagaaacgaagaaggagtaaccaatgaaagcgagcgtgatcgccaaaagcatttcctatccaggtacatcacagttcccggtaacaatcaccaccttcgagctggagtatccccggttcatccacgccgagctgatgacgcaccacgctctcttcaagaactgtgcctccagccgggctatccccaccaagaagctcattgagcaggtgcggaataacccagctatgccagtccattggggtgctaaccaggccggcatgcaagctcacaaggagctgtcgaagcctcttcaggtggcagccaagtatctctggatcaaagctgccaaggccgccgctgggatggccctggctatgcacaaggttggactgcacaagcagattgtcaaccgggtgcttgagcctttccagatgatgaagacggtagtgaccgctaccgagtgggagaacttctactggctccgtgatcacgaagacgcccagccggagttccagcacctggctcgaatgatgaaggaggccactgccggggtggcccctgaattactggtccctggtcaatggcacgttccctatgtgaaaacagagttcatcccgggcatgggccggcaatacttcgatgagaacggggagatcatctctgtagagcaagcgttgaagctttctgcaagctgctgtgctcagaccagctaccgggccactgacaagagccaggacaaggccgaagtgatcttcgacaagctgatcaatagcgagccagttcacgccagtcctaccgagcaccaggccacccccatgcatatagcaggtggctgggagaagggtgtgacccaccaggatcgtgatggttgttactggtcctccggcctgagaggttggattcagcatcgtcaactaattccgaacaattgcaagaaggggtaaactgtgagtcaaggtaaggtcgagttttcgctgtccgtgtcggacctgcggctggtaactggtttcaaagaggcgttcgctgcctaccaggcaggtaaccccaaggtcttggcagccctgctgtaccgcaacggcatggacaccacacagccctacgaagtggttcaccgggaacaccggaacctccgtgggcaacatatctccggcgaacgtttcgaaggctatgagcgactggacgagagctggatcaagaagggggcaccgagcgaggaggcaatcatcgcctctgccaaggacggtagcctccgtgacgagctgatccacatgggtcggcgactaaaccctgcacaggctatggtggatttcctgaatgagtgagagtgttcagccgtataacggcattctgattgattattccctggaccggacgatcccggaacaaggattggcgatgctcacctcggacggcttctacaagaaggaacacgagacatcgcctcaacaaacgctgtcacgagcagcggtgagctattgcttcggtgactacgattttgctcagcggatgtatggttatttcagccggcagtgggcagtgcctgcaagcccggtacaaaccaacgccctggacatcgagtggcccaatttcaccgaagagcagtttgacgaagcaggggactggcttcaagaaaacatcgataccaccgggatgcccatcagttgcttcctatcgatgatcgcggacagccgtaaaggcctcacaacggcctctggtgaagcgaaagagttgagcatggctggtggtggggtaggcgtctacgcaggcatcagggccccggatgagctgtctacgggcgtcattgagcacgctggggactacgatgtcatgtgccgggcttaccgtcagacccgtactcgtcgtggcagcatggccatgtacttggacgtggctcaccccgagttccctgtgttcctccaaatgcggaacccggtaggcggtgacccgaagctgaagcgcttcaacctgaacaacggtgctaacatcccggacgccttcatggaggcggtcatcaagggtgaggattgggagttcgttgatcccaaacacggtaagactggacgtaaggttccggcacgtgagctatgggaagagatgcttcaggttcgtaaggacacgggcgagccgttcatgttgttcgtggacacggtgaaccgtaacctgccggaatgcatcactcatccgttgtaccgggtacgacagagtaacctgtgctccgaaatcactctgtacaccagcttcaagcgtactgcggtgtgctgcctgtcgagtgttaacctgggcacctacgatgagtggaaggacgatccgctgtttatcgcagacatggttcggttcctggacaacgtgctggagttcttcatccgcctggcacctccgagcatgcaccgggccgtacactccgcctccaaggagcgtgcaattggcttgggaaccatgggcttccatactctgctacaacagcgtatgatcccgttcgaatctggtggtatgggcggcatgcagcagctcaactatcaggtttacaagcaaatcaaggagcaggccgtacaggccagcttggagctgggacgctcccgtggggaggctccggactgccagggaagcgggcgtcggaatagccacttgctggcgattgctccgaatgccaacagctccagcctggtcaacgtgtctccgtccactgaaccctgggcaggcaactgcttcaacgctcaaggccgggcggggagcttcctgatcaaaaacgaatacctccggcgagagctggaaaaagtcggcctggacaccaaggaaacctggcgttcgatcaacgatgctgaaggctcttgccagcacatcgaaggtttgagcgacgaggtgaaagcggtgttcaagacgatccgggagattagcccaatgtggttgattgaggcagcagcagggcgtcaacccttcatctgccagtctcagtcggtcaacttgtacgttcacccggacatcacgctgcaagagatgtcggacatccacatctatgcgtggcacaaggggctgaagagcctctactactgccgctccaaggcggcgaagagcatgaaggttggtaccgggggcgctgagcctctgaatgccctcccagtgcgatacacaatctccctggacgaggacacttgcctgtcctgccaagggtaaggagcacacatggcgttaaccgtggaaaactgtctggcgttgcagtacaagtacgtcaacttcagttatccgatcacgatgaacgaagacatgatgttcgtggtgccaattccaccatacaacacctacttcctcatcgacgcaatggaccattcctccactcacggaggttcccaactcaagctgctgattgcgggctggttcctgttcccgcctaccgctagctatgagtggaacatcatgggcgttgccgaggctgaaaagaacgagctgttcatccctcacgaggtggaagaggcagacatcatcctcaacccgatgcaacccccgccagaaggccagatgtggccgcatgaaatctggactgggcagtaaaacaaaggggccttcgggccccttctttgaaaggagagattgtgagcgtatttgttgaaagcaccagttaccgtccctttgtttacccttgggcagtcgaggcagctcgggtccatgccatcgatatgcattgggatgttcaccaggcagacctgacagacgacaagcagcagtatttcagcacctcagggctcgggaccaaccaggttccccacgagaaccacaagtggctgctggacaaaaccctgtccatgttcaccgagatggaccggacagtcggcgagggctacaccaagctcctcccgtacatcaagaacaatgagattcgaaactggctcattactgccgcctcccgtgaggtggttcaccagcgagcttatgccctggcagccgaggagttcgggttcaccgatggcgattggaaagcttttgcctcctacaaggagatgcgagacaagctggaggtgatgggagagaatcgtatagacgcaagctggtccgagcccctccaggccgcttgcatcctggcccaacttctgaccggcgaaggtgtaggcctgttcggtgcgttcactgtgctgctgaacatgaagcgttgcggcaagctgatcgggttcaacgacatcaaccagtggagcctggcggatgagaccgaccacgtggagaagaatatccgcgtcctgaaagccatgcgtaaggaccttaccccggaagagaatgcgatcttggaccaggaaatccgatacctgatcgaagactaccgggaagccgaggtcaagtatctggtcctggctttcgagaagggccctcagcatgacctgaccttcgagcagactgtcgagtacatcgactatctgtgccgcctgaggctcttcgaatgcgagcttctcaaggagcaccaggtgggtgagaacccgttgccctggatggagtggatgatcaacgccgcccgacacgacaacttcttcgagaagaaggtgacggactatagccactccaagctgagcggtgatgtggattactccaagtacaatttcatgttgactagccgagccggttgacctatcatagcccccatgagctgaagagccgtgggggctttttcgtacctggaggattttatggcatctcttttcattcttagaatcgaaacggtgtgtggcaagggtatgtatgccgacgaactgagtagcagggtgcaatccaaggtcctccaggggctaggatacccccgatggcaggctaccggtctctatatcgatctttgcatgtgtttagataaggagaaggagctacatcccgtccccgaggaagacatccccgggtgggaagaccttgccaagaatgaaaaagagatgctcacttactatttcggcttcagttcctgggagcaagcgcgggagtgggtaggcttgcgtgctttcaacgagatgggtatgctaggggctaacctttgcatttacgagatgaaagaggaagatgtcctgctgggagggaaacaggccgccttcaaaatggccaacgctctccgggtgttgaagatgcccattaacaagggcatgcaagatttgatatgggaggagattgaagggtatgacgactaagctgctacgtttccaggcagagagccctaaaggggagaagatcacattttccttgaactggtggtcagacgggagtacaatctggtatcgtatccaggcagaccggggagcttcccgggcttacaccgacatcccttgccagcaagaggccatgaaggaccttatggaggctcgggaggtgtgggtccgggaagggttcctagacaagttcacctcatttacaacgaaaggaggagttggattccatgagtaaagaaatcgaagcgtttgacgtggcaggccgccgactgcatgtgggcgaccaggtggctatcgccagcaccgcagggaaggctactgagatggtagtcaccactgtggaagctgtccgggcgaagacggtaatcctgaaacatccgactgcctggggtgctcaaacctctcggcgtcactcggctgtgtgcaagattcccgaactggctggaaaggaggtgtaaagtgaacaagaccatacgtgctcagctcaacaaccactacgaccggcaggggctgacgggcaatcatcgccgtctggcaatgaaggctgacctccggctggtcagggagcggactgaccatgacatggcggagtggttgcagacgggagaaggtatgttcgtgggtttgaagagcgcctttgtgtggagtaacacccgggaaggctatgacttttggctggataagaacggccaaaactgttgacaggatgtacggggccgggtaaactggccctatttcaaccgggaggtaaagatgaacgatcaaaactacgattttcatgcagaggggaaattccccgcccattgcgacgaacgggctgaacgcttcttctctctggttttcgtagggaagagcgtcaagggtgcggataagtacggctacacctacagttggaactcccgccacgccgaccttcaacctacttccacccttcaacagcgcggggcccactcctgctccttctgtggtcgtgctgctctacctgtccagaacagaggggatcgatttgcagggtacgactactccgtcgaggggtacacctgcatctgctccggcgccatggacgagcttgactggattgttcaggcccagaggatgaagaaacgtcaccaggaggaagtggaagagatgttgcttcaacgtccggtacctccaaaagatgtccgccaggagctgacaaaaaatcgtctgatgaggttgctttctgacgtggagaatagtaaccttgtctccgcaatgaggctcctggagataacctccaaccgcccctcagtatggaacgaaagctatgaacacttgggcagctaaacgccaggaagagatggtagcctgcgggtactctttcaaaaagcacgaagatgggtattgggagtgccgggacgaagagggcaccctcatcgagactcaccgccaactgggcaaactgatttcactgatggccagctccctgggcatcgattaggaggattccatgcaagacctgtatagccaacaccgcgccgctgtcaagaaactcctccaagaggggcgaaagctgaaggcgacctacgtcatgaccctctacatggagggttccagcccgaaggatgaagaccctatggtagcccacctcacgttgggtaaaacctatgatgttatcacagacggcctgtacaaggatggttccttctacgtggtggacgatgagggctgggatcacctgtttcccctggatatcctgcccgaagaagatggatgcccacggttcgatgtgttcgatcactttgtgtttaatgtggagggtcctctctgatgtacgagattcagttgatcaacgactgcaacggttgcactgctactctacaggttgccgatgaagaggcagctctggatttgatggaggagatggagtatgcctggacccgctatggcagtgattggatgccgtcttggttagggtttaatccgaaactctcttgacaacaccggagggctcttatacactgagccctcaaccacctttggaggatttatgaacactgctcaaaccatcgcagacatcctgattcacctcgctgaccgtctgtacactcagaagggtcgatgcctcatcgacgggcgctgcaactatgtagatggccagggaaatcactgtgctgttgggcatcttctcagccaacagtcgtgggagttcgcttccaagtgccacggcggcgtgccatccctggagaacgactgggcgcggcgtaaagatggaagtgtggagactctctatgacgagaagttcttcatcgcagacatcggtgttcgccgccgtctgttggactctttgcagttctaccatgatgagccgtctatgtactggacagtggctaaaagcccgtcattctcaaaggtaagcctcctgttgtctatggtggatttcctgaacactcaaggcctggactttgttgagcgcccccaatctagtgttaagggcttctggtcggaagctaaaggaattcttcgcaatcgggggtaccacgtatgaacaaggctctccttctgaaagaccagttggcagcagccctacgatgtgaagaccataccctgcaaggtgttgtcagttctatcgtgttcggccctacccaggggcttgatcataacggtattgcgatccgtgggccggggcttctaagtgatcaccgggaactggtacagcgagccgacagggtatggatgaacatcgcctaccgtcgagcaggtttgctagtcaacatgaatggctttacccggtctgtggtagatgtgtttattctcaaagacaggtatcacgggctgacagggttgaggtccgtgggtgtgggtgagggatgggcaaatgccctggccatcgactgtgccctgctgaagaagcagttcgaagttattgtcgaaatcccttaccagtacgaggggtgggcaaccgacctggtacgggcgggtgagattcctgaaggtgtgaccatcatgtcctcgggggtgtagatatttgaggggctggggatatttgctctagatatttgggtggccccctatttcgagctagatatttgaaggggcctcccagcctcgctatcacattttaagccggccccctgactcacggcctaggttaggggagaaatcgtctcctaggcccatcagaggagcttccaagtgcatatcactatcatgcgtacatctggtcctgagattcgttgtaagaagtgcgactgccccacccctgcccgggatatcgtagaaggcctctgcccttcctgccggacactcaaggcctgggaggcgctagggcaggctgctcaggagctgtgggcttccactttcaagagcgtcaagatcgattccgttcgtcttgaacaaggtacctgacagattttcacagccgggcgtaaggtactcgacagattttcaccgagcgcccaaggtactcgacagatttttacagagacaggtatcaaaagaactgtcaagtttccctcaccaggtggcccgacccctcggcctcttgtagcacgtcaactccccgctgtagcacgtcactcccccggtaagtagctccctatctatccctctcccgccgaaactacctttcacatgcaatcaccatgccaaccttgaaaagcgggcaggggcggtgtttgtctccggcgcccggcccctccggcctgctttcccgcacgcctacagaatgccaggatgagcctggagtgtcaagccttgggccaggatttttcatcgccgacctggcatgttccttgctacgcttgcgcgttcctctacctggcgttgccagagaaatttcttaaaaagggggttgacttctaaccgttccaccgtagaatgaccctcaagcaaggcaaacaacctgtaggaaggtaaccatgcaaaaagctctctgcaatcaacgtgacctgtacgctgcctataaccgtggcgagtatgaccgcgtggccgtagacctgaatcggtacttccccattgagcgggataatcagtgggaagatggagatgcgaacctgcgtcgtcgcacctatctggtgaagcactcgaagggcgtggccaggtggcacactctctatcgtaatggtcaggttcacggcgtcggcgttatcttcgacgtcaagccggacgaacccttccgaactgcctgaggagagacaagatgtctgtcaaaataggggatatcgtagccatccggggcgaccttcggaaaaagctcgacggaacgtgccaatacacgcccgaacagttggtaggtggtaagttcctcaagcataccggcacgggagaaatatggactggccgagtgagtaagatacaaggtgatatggccaaggtgggaggggcttggcgtgggatcgaattctatgtgccggttgacgaaataaacgcttgacaacctgattccccccagtcagacaatagcacccacaaccccgacagaggtaacacacaatgcaaattcatttctcctcccgtaccgcagcccgtgctttcgtgaagggctcttccttgcctcgccaggtaaccgataacggcgcggaagcttcccgccgctggggagtcaagctgaatatctcccccagcgtccgagtgctgggctgcgaatacctcgcctttggcaaggctggcaatacggtgcctgtctacgtcaagtaacagcagagtgcttttagggttgcccctggacgccgggggcagcttgcctaaatccactccgtaggagataacacgatgaacactgttcaaaaaaccgtcctggctttcgttctgaccactcccctgtctctggctgctggcgccatgatcggcaaggccgttgccctccctcccgcactgaaagctcaagcggtcagcctggagatggcgcatgccaaggacctggcagacaactacgttcccaaaatgaacatcatccataccgctacaggtgctatcgagctgggccaggtgtacggggaccgcttggcgggcgaagtcaaaatggtcgttaagggtaaagtgatggccagtacgcacattaacggtcgcagtgttcagcaagccctggaggaggcagcaggtggcactatcgaagatcgcgtgctgaataaggatgtcactttccgaatcaccatggatcgcctgtaccagtccgaaaacttcccgcagttcacagtagtgatgctgaactcgtctgtctatggcaaagacggtgacagcctaaccgcactggctgcccgcctggaaaaacagcgcctggccacggtgaagttgttcgaagaaacccgaatcctgaaataaagtgttgacacggcatctcgtgtctgtagaataggcatcacagagggggacggtccccctcctcctaaaaggatatcagcatgaccactctcgaccctaaagaactggcacgtcaaggcatgatcaaggaagctgttcaagctttcaaagatatgggcgtagattctccctggaatgccgagaatgtggcaacattccgaaactacgatgtcaccctgggcgaggtggacttgtccgaagaggagttcgtggaagagttggattccatccacgaaggggttaagatagccaacatctctttctctgccggccaagtgctgctaaaaatggaccccatagctttccgttgcgcatgcggggagtatgagtctcaattgaccgaggagttggaggaggcgctgcgagacgaagacgacgattgtatcgaattcttcatcgaccccgccgattgggaagcggttgaagaagaggaagaataagggttgacaaggggccaggaaactcataaactggccccaacaccaacgcactgagggtaacacaacatggtcaagttcgaagagattgcacaacgtttcaagaattcccaacgccgctgggacaagccgggcgtcatggctgccatgcaagaggctgtcaataacgctcccgtcaaggtagtggtagagtccaccagcaaggcgctcaagcccgacacccctaccgttcggatcatcgtccgggagtggatcaaagctcggctcggcgaggagttcacggtgtacgatatcatcccctacgtccaccacctggccacccccagcgatgtgaacaacgccctcaagcactggaaactgcaaggcgtgcaaatcccgaccattcgccagcagcagagggaagcggggaaagctggccgcccgatcaatgtgtatcgttgcgatgagttcgcagcctaacctttcactctgaggagatatatcatgcgtactgacaaatccggcgcccgttccgaacgtaaagaagccatcaaggcgagccgtgagcttcgcaacctgcgaaagaacaagcgtaaccagtgggtcagcaaggactaacctggcgcctggggcgccttccctaaaccctggacattctccagggtttacgaaagatgctctagatgttaccctgcaaccccacatttgaggtttaatcatggtcattgaatgctaccccggacacgtagaatactgtttcgccctggccctgtgctgcgctcgtggagggaccaaagttaaactattccggaccggtaaagagtggggagtgattccgtgccgagacgtttaagagccattccgacctgggtatctgggggagatgaagaagacaccccgcgcaagcctgtcctttcggtgatagaccgggcttgccctatccagcggaagttaaatgccctggaccgagattgcgaggagttacggcgcaagcaagacaccctagagcctgccacttttgaccaactggccaatagcctggaagagcgccggcaagccttgtggaaggccttcgaatccaagtatggcgcagagcctgagggggacagccacgacactatcaaggctttggccgatgccagtatccagcctgcgcagcatgtggacatcggggcactgctgttgctaggactggtggcgttactctttgccgcgtggttgttcaaataaaagatcaaaaagggcttgacgtgcgcaacggatggccctagtatctctctcagaaacacaaacctttacttacaaggtagatcgaaacatgaataccaatgcaaaccccgcgcaaacccttactcccgccgacgctttggaagcggtggaacttctgatgatcctgggaatcgaggcgtaccaatccggtgcatggttgaatgaaagtgattcaactgttcaggttactgacagcgctattgcgttgtggagcagcactcttaaccgctacaagctgctggacctggcacggacgtttgctgaagaagccagcttgttagaacttcaaatcaaagcccgggaggtttgctaatgatcagtctcgttctcactctctgcactgccctggcatgtgatgattatgtgatcgctcaagacagcgatgctgacatcatcaatcataccctgtacgttgaatcagaagagttaggcgatgcctgggtggcccctaacgccaatgatcgtattggccgctacctggcacggttcaacatctccactcccccggctatggtagtggactacgactacactgtggagggcaactgagatgcattggaacattctcgacgatgtacgcgccagcctggcaatggttttcctgttcgaagcggtccatgatgtggctgcctggaccctgctaggccataagcatggctttgctattgaagatgtggctgccctgtccgccgagttctacctgcctttgacggaagtattccaggccttggaagaggcatcaggcaacgtcgaggatgtgagggaaaccttgcaacaggccgcagcaagtcgattagtcgatgactccctggactactacagccgataacaccagccccgctcatgcggggcttttgtttgcctgaaataaagtgttgacactataggcccttcctgtagaatggccgccatacacaaggaaaatgttccacaacatcatctggagataatcatgcgttcgatcaaatccctcgcacgagaagcctacaaaaaccgctatgcgtttgcacgtgtaaccgttgcccgtgatggaaatatgctcgggcattgggctgaggagggttttgacccggtgaagctggggaacatccacgattgttccaccacggtgaatccgagaaagactggcgtttgcttccgaaaccgtgactttctggtattcactttcgggatggaggtccttaaataaccgctcgcaaatctcctttaccagcccggctgtgccgggcttcacagtaaaaacacaggcagagccgaatccccggggcttgacaccagcgatagccccgatagaatagccaccaagcaagacaaaacctgacccggagaaagcaaaatgactggtagcaaccctaacatcgacccgaacactgtggccctgttcactgagatacgtttctacatggcgcgcgccttctttgcgtgtgcttttgcagatcaagctgaagacgccggacaacccttgcaaggtgagattctcgaccaattgccgcagggttggggcgcggattgggcacccttccatgcggcggacactcttattgcacaactggtcacaggcgtgaaggctgggtaccgttctgaaaaagttcagaaagccacccctgtagagatcatcggtgccctgttcaaggcttgcaagagtcgtcatggtgggcgcgcctatgaccgtgaagcgaccgccgagaacttcgggcattacctggcaatgggcgccatgggaacgggggtaggtatggagtgcttcggcccggacgtggcaaagtatttcgaagggctgccctatgtagagttcggctcgcacagcctgagcaaagattatttctgaggagaacactgtggcaactcacaaggcaattcgtgacatcctgtctgctgcaaccgccctggcatttgccgaggttgaacgcctggcgcgggaagtgttccgggaagaccccaactgtatgaatttctgcatggctatgggtagtgcatccttctaccgggagtggatagattgtaacgatccggacggggattggcccatgaacgagtacctgagtgccagggaagtttatgaaatgtcaggcagccaggccgccaaacacctcgacagccttctgacagagttcggggaggcgcttcgtctaactggccaccctctgaagttgacccggatgactgaagacagtatccttcgacaaacggactggtaaccacctacatcgggagtttccctcaatgaagcaagtgtcccccaaattcatcattcacgattcgcacctctaccgtgctgccatcctgcccaaggtggaaaaggactctttgggcaactggtacactgcccgatatgtctggactaaggcagggattcctcttgccaggttgatcgcgggagaagatcaaaaccccctggaaagcttcctgctggcagagggcgctgttatggaccttggccaggccgaggagacgactgtggagcctgctactccctggattgtctttgtaggtgatgatccggtagcagcctgcactaccaatgccagggcgcatctccacatcgcggagcaatggctaaacggaaactctaccgccaaggtgatgcattgggatgaagtcaatccggatgtgctggcgcctattctgcgtaaactggctaatcgcggcatctacctggcgacggacggtcagaacatcgtgaccgtataaagttgacaagacccttttgggtttgtaagatgcgtgtcaaagggaaggtataaagccttcccgcttcaggaaggtgaacaggaatgaacatcattgaccggacccaaggccacgagagtcccaatcactgctatatcgtcactggcagcattgggccggagttcgaaccccttcttttcacgtctaagagtcttgctgttcaatacgccaagcaaatcatcaagcacggaaaagcgcacgacgttttcccaccctttacgcctgttatcgagacccgtcacaaggcggatatgcaccggttcaccgtccacgacaaaatccctgaataaaagcttgacttccctcccgcttcccgtagaataggcttcaaagggcaagggccctctttcataaaggtgacacaaatgaaaaatatcgaactgaacatcggtggcaaagacttcactttcaaggtggaggtggtgagagatgatgagcatggggcgccttgggaagagcaagatgggcatggccctgtgagcgattggacgtgtcgagataagcgccctggcgagttagtcttgaacagtgacggagccaggaagcgtttctatgacttctccgaggcctgccggattgccctccgtgatggttgggattcttatcctcacaacctctttggcgagcaatccaaacgccagcaagctgcaaaggccgcccgtgccgacttcgaaaatcttcgtgcatggtgccaggatgaatggtattgggtcggcgttattgtcaccctgctggacgaagaggggaataaaacggacatcatcgactctttgtggggaatggccagtaacgacgaagacggcatatcccatgaggctggaatcctcgccgatgacctggcaagaggctatggcgtccgctggggcgagacagcaaaaactacttacgaattcttctaaaatcgcttgacagcttaggccattcgcgtagaatggcccccaagcaagacaaaccaccaacaggcaaacccaaggaactaaatcatgactactgaaaaccttacctctcaagagatcgaaacttctgttgacgaattcctgaagtcaatcgacgttaccctggccaccgtgcatcgcggcgagcgcaaggagggggattgggtgcatgacctgtggagtgtaagcttcatccatgagcatggcgttctcgatactgaattccgcactggcatcgggcaccgcaaatccacgattcccatgcctgttgacatccgccgtctggctccgaacatcctggcacgggtggagtgggaaaaacgtcacatcaagcctgtagctcctaaggccgcctgtatcctgtccagtttggttcgagattgtgatgtcggtggttccaccttcgaggagttctgcggcgacttcggttatgacaaagatagccggaaagccctggacacttacatggcatgtcaagagattacatccaagcttcgccgattcttctctcaggaagaggtcgaaaccatccgtagtctggtagagcattactgatgcttcgcgtgtgctacaagtgtctacatgttgggtatcctgttagaaccctaagccggaaaaccaaggtctggtacctaggctgccccctctgccgttctggagtcttcttttcctgaacccaagcccccaatccgggggctttctttttcctaaagggcttgacctggccccctcttcctgtagaatgcgcatcaaagggaagcacaacgctccccagacaggagaccatacccatgagccaggtcaagattcaagagtacattatcgcagaggtcaaggttaaccattgtgcccacctgcgcaagggccagaccatccaagcccgcgatgctagtagcagtgaaaagtggattgcattcatggtggaacgtgggtatagtgcctctgaagccgctatcctattcaaagatgcacatgatgtggcaatgctcgaactggcagcctaacactcgaccttaataggagttaccaatgtctaatgtgaccgtttggaccgaagaatttgaaaaagcggcagcggctgagggctggcttatctctagtacgttctctgaatcaagcccctacgaagtgcaggcgatagataacccggaagcctacagcatggataagggggtcccctgccctcctcgtttgtcgggtgaccgtgccgcatgggcgttgttcctctctggcaaagaaccccatcacagtgcggcccgcagcttcatatcccagcactcccctgtagaatggaggttgatactggaaagcgtctgcaaagactgtcaagggctgggccggggaggccctaacaccacggacggaggggagcacgacgattgctgttcctgctctggcacaggtagctccattctctgaaaaacatcttgacgggggtccctggcttcggcataatgacccccgtcaagcaaacaaaccccggagattcccatgaacaccttcgcatacgcccactacgtcgcccgcatggacaaggcctcgggttcgagccttccctactccaccctgttccgcattgcccttcgtaacgcctaccgcaagcctggcgtccgccaatatgattacactgccctctccgaggatgtcaaaggccgcgaactggcccaaaagcgcacccgtgctgaaaaggctgtcgtgatggctgcggtaatgcgagggattcgcatgggcttcaccgtgagcgtgaaagacggcagcgatggcgaatgggtggttcgtcagtctaccgatgtcaaggaaatttccgacagcctgcaatccacctgtgacgatgttatccgattccgcaaagggtctggccctgagaacgttgtcggctccctgtgggcaatctacggcaacagcgctggcgaagtgatcgcggattggtcggacaatgacaccatggctatggtgatggctcccgcagaacgcaagatggaaaaatacgctgagatggggatttaatgctttacggggcccggcaagggccccataatgcacccatgccaaacaacagccctggagggcaagacgatggacatcaaagcgcgcaaagcaaaggccgcacagatgatcagtgctgctggatggtctgttgaacgcatcgacttccgccgcaacgtcatccgcatcggcaacgccggtaaaaccgccttcgtaacactgtggcgcggcatgactgacgaaatgctggcatcacaaatcgacttgaccattcgcacctcctaacccccgtcccggttcgccgggacatcgctttgaaggataaaacaatgtctgagcaagagaaagatgaactggccatggtagtccatcagcgggatatgctctttgcggcattagattccctgatgcgcgatacagggcttgtaaccctcatgcgccctgatcaggttgtaaggaacctctgcgcccttgcagaatacaagtgtccatcccagggacgccagataggaggcgaaaaatgaagagcaagtatgcaaaaaacatcgctgcggaatataacctttcctgccgagttcgccggattacttttgaaagcgcccggcgccaccctgacagtcgcattgtgaagctcgcagcatcctacgcctgtgctgcctatggccgtccttacaaggactgtatcggtgcctacaaggccgccaagcggcgagagaaggcaatgcgaaaccccgccacatggaagctcaaccgggaagctaagcgggccgtgcagtggctacaagctgccatgaacaaacgcaaataaggctgttgacagcctaggccattcctgtagaatggccatcaagcaaggggataagccccaagcactaggaaggaagacgacaatggtcactatcgctctgaatcacaaaaacatcctcgacaatgcttgggcattctatgcagccgacgtgatggtccgtatcgacgccatgcaggccgaggaagagcgccagatgcgtgagtgcatgggtaaccgagacaactatgacatctcggaaattcagaaggttgtggcctacaacgaaagccggggttggacccgtcgtgccaaaatcgcccgcgcaatcctggccgagcgcctggcagaacccctgattcactcggtagacatcgcctttgcagtggaggccgatatggaagagattcgccgagtagaggtccacaattccaaggctccgaccatgcggcagttgatcgaactgagtgacaagtggatagccgaaggccgagtcgatttgcatgcgcagactgtggagcttatcgatgggtgggctgatgcgatgttgacagaaaaagcttgactcctcttctccctgggggcattatgtctccaacgaaacggaacagcccccaagggagaaaaccgatgaacctgcaagccattgtcaacgccctgttcgaagctggcaaagagttcaaagcctgcaaacgtaacgccagcggctcgatcaacggcaacagcaagcaagctgtgaaaaagcgccttgtggccaagctgatcgaagctggtgagaatcgcagcgacgcatgggccatggctcacgatctgggacgtaactacaactgatcccataggcccaccttgaggaggtaggaggtgggccatcttttaggctaaccctagagagggaaaggcaatgaagaacgttcaaatctgttgttcgaagtgtggagcaatcaacggcggtaagagcaaacacaatgttgtagtggctctgggtaagaagtggtgcgggcactgtgggtctaatctcgcaatcaaggaaagatcatgaacgccaccctggcacgtcttcagaacgaacgctgtgcaactcttcgattgatgctgctcccggagcatcgtgggtacaagttcactggccacccctgggccgagcgaattcgcaatctccacgatgaagcccggtgcatccgcagccatcacaactaacccccttcccagcccggctgtgccgggctttctctcataggaggaaccatgaaagttcagatcggtcagcataccctggaagtcgtagctcccgcccataatgtccccaagagcgacgggtgttgcagtgtgcttttgaacgggacactcctctacgttggtttcaaccctcgtgacgcttgggggctgttcgaagacctggagaaagccctactcagcgtcgaagctctgtcggtagagtctgaggaggccttgcatgactggtaacgtcctggggcagtccccattcaccccctatgcctcagtgccaggacctatgtttgaattcgagtggttcgacgtagggaatgccgtcatagagctagagccaggatggttagtaggggtagggtttggagtggatagcttgtttgtactcacctgggttgaaggggaaccattcgccgagcggcgaccctggacccctaacctcaggtcatagattctctattcggtcgccataataatgaccctggggagggtcctacggaccgtcacgataacaggggaattatggccatgttaacagggcctataggcttcgtagaagccagtttagcttaggcagtaccctagtataggaaaggccttgaaaaggccgtatgcgcgcccccagggggcctatcggggagggagtgggcaagtgccccctccccgtgtctaagccttatcaactggactcttcgagtccattccaacaggcttctacgaagccatataatcaccagtcatagcaccaatcatgcgcagagcatccgggtaggatggtcaagccattggtctctcctctctgtcaagaattctgtaacattcactaggtcacgtcgtgacccattgtgtaacagtcttcagactgtcattcgggcaggggcatttgcccccttcctgccctcctaaactggctggcttcgtcgaagccttcccatgccaccagcccaattatgtaacatcctggccatggtcatggcccattgtgtaacggcattgcatgccaggatcaccagacagtcccagctaggccaattgtgtaaccattccccatcccagcagcagaatatccccagccagggaacctatgaccatccccattgcatcctaggtgctcagcccctggaatacgtcgattgtgtaacccatgccaacccatgccctagtagacctcttcgaggcgagctaatgccggcgtctctctaccctcacgggaagagttccccctttattatggcgaccgaatagagaatgcccgattcatgcggcctgtaggccattacaatggccagcccggggaaggattgcattacacaataggcttaccctcacccctgaattgacaggcctcttcgaggctagccaggctcagataggcagcctgagttacacaattcaccctcacatattgccccaccccccatgccacacccctgacattcaaccccatgccccagcttcaacagatacatttgcttcgacgaagcctggatatttccagatcatgacggcgcctcatggccaccctcgggccttgttaaataccccagcggcctcgctgaaatttgaaaacggatgcccctccccagtcacgccccccaggcccgttccccaggatgcccccagatatattccccaggctggtgcccaggaagggtgccccatgctcatctgaaattttggcgggggtgggtttctgaattgaaaaatgttgacaggcccctgccggggcttcacaatggctccacattcgctgccagataggaggcaccccatggttttgtttatgtatgatgttgaccccggctccctgcctgtaggttgctacggggctttcctgaagactccccacgccatccgtgttgccctgtgtgagctggctagctgggctaaggaaggatgtccccagcatcccgtgtttgaaagacagaaacgaatctgcaacaacgtggggaagtaccttcttacccatggcaactacactcacctggcgatggtgaactggaagctggaatacctcatgtcctgggctgggttttccagagggcacccccttcccttcgagctaggggatgagcgggatgagatgggtcggtattacgagaacctcaacaggttgcatttcctggacatggtggttatgatgtccaagatgtattacaacgatgagatgaagcgtttggaaggagggaagaatgatgtgtgagaatgtgcgttttgtactggctgtgaagctcctccacccaaaggtgaaggcagggttggccaggatggtcaagtggtacaaggaaggtatgcctggtgaccgcaccttttccaagtacatccggctatgctccaacatctttcttgagacaggtgttgagtatgccctggttgatctgttcacagcttacgggctgtccttcacctcctcgtacccgttcgagggtggtcatcggatagaggtccctgaggacatctacaagaaccctctccgggtcaagttcctactggatgttggtgctgtgttgaaggaggaaggatatgattgctgatctgacatatgctcaacgtgttgctgacctgaagtgggcctgggacaggactgataagggtctccaggaggtgctgagggagttcgtagcctggtacaaggccgggtgcaggaatagtgaccgattcacccgctactggcgtatctgcaccaacgtgaataaccactgggacagtgggccctatgatgacttcgaaatgggcaacctgttcatcgctgccgggtaccactacatcagcttcccgtttgagcaaggggagcgcctggatacctcggacaacatctacgataaccctcaccgcagggagttcctaaacctgctccatgaggtgatccagcaggaggcccagaatggagctgtctaagcagttcgttgccaccctgacgggtgtgcccgtgcctgtgaaagaagctctcttcgagcttggcaagtggaagcaggaggggtttcctgatggccataaggtgttcaagaagacgtaccggctgtgcgataacctggtaggtttcctggagtatcggtctctggaccaatccctccttgcaccgtggtggtcctacacgtcagcgttgttcctggctgcggggtacccgggagggtcgtatcccttcgagaatggagaataccttgactgggcggatgagctgtacgataatccgaagcgtctgaaattcatcgacatgtgttgggaggttttgaatggaaatgggtgattatgtgtggaaagagcttgcaccagaagtgaaagaggggctgttggccctggtgaaatggaaggatgaaggcttctccgagcatccttgctttgaccgaagggtccgtctgtgtaagaatttggcctctttcttggaggctaaaggtatgcgtcgggtagaatctatggtactggtaatcaactccatgtcaggtttactcctcgctgaaggttttaaaaaaggggcgtaccctttcgagaaggggaagggagaccttcagcccatgatctacactaacccccatcgtctcgaattcattgaaacttgcaggaggaaactggcatgaccctagacctaaacagagcacctgcttcggctacccactactccgttcggacggactctccctttacaaccttctggagaaaggaaggtgatctgtttacccgtatatgggtagctgatgcagagggtttacgtctcccagaagggcgtactcccaccccttacgagaaagatgttgcgagtgtttatgccaagcccttgccatcccctcctcagggtgtagtggataatcctgtcgtggcttcataccgggaagcgttcagccccgcccctcaggttgagtcgggagaaccccaggcacgtgggaaagtggactatagcagtctggacagctacatctggagccaggccccccttcaggccaacttcttctctctggggctgaatggagagttgagctgctggctgcacatcgaagaaggcaagatcgtaacggtttggacggagcagggtacggtgtataactatcggacctcagaccgccaaccttcggtacctggtccgagattcccccgcccccagaagaaggaagaggcctcccctcaagagtgggacggtgaaggactccctcctgtcggctgcaccgtccaactggtggacatctcttctcctgtgagcccgcctttcgatgagtggttgcttggggactacctggaggtgatcgcccacaaggaggtttgtggaaccgttcgtcctgtcgtgtggaatgacaggaagcagacgggatcgtccatccttccaaggctgattagccctgtgtcccaagagactctggctgccgagaaggaacgccagcaaggtatccaggaaatggtctctttggtgagcagcatggaccttgcccgtgccctggaagtgctgtatgatgcaggctatcgtaaacaggaggacaccgaatgaacacccatgaacgactgctacgtgctgtgcaagctctgcctcgggaattgatcccgtccctgcatgacctggtggcctggtaccactcaggctgcccggatgggtccccgtttaacacctcccgcaggatatgcgggaacgtataccaacacctcatctgcaaaagaggggtgagtcctgaaagggcctgtgatctggaggactgcctgtactccctctacggggccttcctggatgttgacctcagctacgaggggtacccattcgacgacgaagcgacaatctacaagaaccactacgacaacccgctccgcatggccttcctcaagtgcctgtcggaggtgctgtgatgcgactcaggaagattgaacagataaacttcgagaagttctcctggcagactcaggttgccttgaaggagctggctcgttgggtgtttaaggatatggggccttggactgaaggtaagacccacccggccttctaccggggttatcgtgtttgctccaacctccgtctgtgggagttgcattacgggtggggggataaacatggtcggatgatccagacggagttgtctgaagagttcatgcgtgtcggtctgaacgtagacctccccttcgaaggccgtctctcggatgacgggatattcgttctggacgaagatgctgtcgaagaactgtacgacaaccccctccggcagcgtttccttcgactagccctggagaagctttcagagcccaaggcggaggtcagtgagatgctggaagacgcgctcacagccgtgtcccgctgggctattttgaaggagtccttctcctgcttcgaacctcggttccgaatctgctggaacgtggagaactaccttacctggttagggaagagcgaggcagaggtcgccaaagcttatcaggagttgtccaaagtcttcggcgtcatgtacccctttgaaagtgaggaagggtttgacacagagga

SEQ ID NO: 22 - DNA, 66001 bp, Pbunavirus EPa25; identical to SEQ ID NO: 14
  source 1..66001: mol_type = genomic DNA; note = EPa25

SEQ ID NO: 23 - DNA, 66271 bp, Nankokuvirus EPa26
  source 1..66271: mol_type = genomic DNA; note = EPa26
atgtataaactcaatcctgcactgcgagcggtctggcgaactcgcgcccgttacaaagtcatctatggcggccgggcgtcttcgaagtcgcacgacgctggcggtatagccgtttacctcgcggccaattatagactcaagttcctctgtgctcgccagttccagaaccgcatcagcgaatcggtctacacgttgatcaaggacaagattgagaattctgagtacaacggcgagttcatcttcacgaagaactcgatcaagcacaagaggaccggatcagaattcttattctatgggatcgcccgtaacctgtcggaaatcaagtctaccgaaggcattgacattctctggcttgaggaagctcactaccttacccaggaacagtgggaagtcattgagccgaccattcggaaagagaactcagaaatctggatcatcttcaacccgaacgaagtgacagactttgtgtatcagaacttcgtggtgaagccacccaaagacgccttcgtcaagatgatcaactggaacgaaaatccgtttctcagtgagacgatgctcaaggtcattcacgaagcttatgagcgcgacaaggaccaggccgaacacatctatggaggcattccgaagacgggcggcgacaaatccgtcatcaacctcaagttcatcctcgcggccattgatgcccacaaaaaactcggctgggagccggccgggtcgaagcgcatcggcttcgacgttgcggatgacggtgaggatgcgaacgccacgactctcatgcacggcaacgtcatcatggaagttgacgaatgggatggtctggaagatgagctgcttaagtcgtccagtcgcgtttacaatctggcgaagatgaaaggcgcctctgtcacttatgactccatcggcgtcggcgctcacgtcgggtcgaagttcgccgaattgaatgactccagcccagacttcaaactgacctatgatccattcaacgcaggcggcgctgtagataagcctgatgatatttacatgaagctgccgcacacgacgatcaagaacaaagatcactttagcaacatcaaggcgcaaaagtgggaagaagtcgcgaccagattccggaagacttatgaggcggttgtgcatggaaaggtttatccattcgacgaattgatttcgatcaactctgaaacgattcacccggacaaactaaatcagctatgtatcgaactttcctcgccgcgcaaagacttggatatgaacggccggttcaaagtcgagtccaagaaggatatgcgcgagaagcgcaagatcaagtcgccgaacatcgccgactcggtgatcatgtcggccattctgccgatccggaagcccaaaggcttcttcgacttctaaacacagaaaagcccggatcgctccgggcttcgggtcttactcggtgcggttcctggcactgagtgtcgatgcagcggcctcgccgacttccagagctgcctgaccggccgctagcgcttcggcttccgactcgacgatgaagtcatcaccttggccgtcgccgggcggaacctcgaccagcacggcttcttcgccctcgaaacgcaggtcataggtcttctcaacggacaggccgtaacgggcattgagcgcatcccagagctgagcttcataggtccgaaggtcttgcagagatttctggtggctgagcatcgccatgtcgacggcccgttgcagggtttcgtccaggacgttgagtcgcatgcgaagagaacgaatccgctcgaccacttccgcatccactacatgtctttcgatcatcgcttttcacctttgctgaatgttacgttgtagccgttgtcggccaaataggtaagagcaccttcaaaggaagttccgacgaggtgccttagctgcatttcgcgctgcgcagcgatccaaaatgcagttccggagaactctgcgcggccttccgacagaacctttccgtcaggcccgtcgattcgaacgtgaacggaagatagcttcagagccattagtgaatccctccactggcttgcgacggcattctttctgcgcgagcagatgcgcagtccgggcacgggcaggcctggcggacgcgttccaactcgtcggcgtccatgacatagagcttcccatcggaagtgtcgtgcgccatggcgatgttcgggaagtcggtggcgctcaggccggcgacagcgcggatttcgccccagagcgcttcattctcggcattcaggcgagcggcgagcgcttcgtgctctttcgctacacgcgccatgaactcgtccatccggaatgcgaattccgcatcgatggcgcgggccgaggccatagagctgaggtgaatcggttctttcttcatggtgattctcttttggctggggtttgtggtctacccaggcctattcaaagccttggtagcatggtgctgaaaatgaacaagaatgctacaaacgccaacagcgtccctgcgagcattctttcttgactctgcagctcagcatattccttggtggacattccttgctgctccgcctcggccgcgaagcgggctttcgcctcgataacttccgggcgcagcgaaaggacatattctaaggcctcttcccgcgctttttcggcctctaccaacctagggtcgcgggccgagacttcgctgtgccctggccgcgcgggatgggtctgcagcgatggaggaagttcggcggccacgactccatagtcggagcaggcccaagcgatcccgatgaggatcgcgaggatggactggactattcgcagcatcactttgtcgctaggaagacccatggctaatcctccaccgaccgaacgatttccatattgcgaccggcattggttccggcagcgtaggcgcgccgaccgtcactgtcttccagacgcatgagtttggtaacattcgacttcttgtaacccggatcgccgaaatgttcgtggaccgcagcctctttcaccacaaccagagacgttccggccgaggaaaccagttccatacgtttcctggtgatggattggaggcgatagctgatttcctgggtcgcggcgagcttaaattgcgcagcaaccttgacgttaaaccgctcgaacccttgagccttctgatattcccggcacagacggtctactgcctcgaccagggagttgaacatgttcaccgcaagctcaacgtccgacttgtagcctttaaatcgaacggcatgaccccagcgcttggtggtgcttccgtcgcgagcgctcctggacgccttagccgatgctcggtgattgttgatgccaccggcgaaatccatgatgcaatcattatacgtcgccactgccaccgagaagaacttcatccagttcgggattgcggaatagtagcgagtcgcaatttgctcgtcgaattcttcgcgaatctcaccggttgcttcgaagtcgtgaaggtcatatttatccttcagcttcttcacgcgttctgccgcgatggcagcttcgtgcggactggaagagtcggccgccattgcagtcagcttgcgaatgcgatctttcgccttctcgatggcttcaggagtgaattcgttctggtcggtcatggtcggttccttttgtctgaaggtttcgcgtttcgatggagctattctgccttcatccagagtggaagtaaagcattttctttcattatttcggaagagcctggaaatagttccagatccaatcgcctgcggccaggacaacgacgagaactgcgaagaacacgactgcagagaccaattgtgcgccaggcttcagcttggggtggctgagttttggctctaccggattctccggagtgctggcgcttggcccggcgtcttctggaccaaagccggcgccgcgctcgcgtgcctggatagatgctatggatttcaaatactcggtctgcttttgcgactcttcgtagatgccggcgacggcgaaccagagtgcgaacactacggccgtgcagatgacccaggctccggtcagaaggatggccagcggaccgatgattaagacggaagccgccaggacgatggcgccgccccagatgatgaagccggccagaccattggtgatgtcgatgcagaatttcttcattttttggttccttcggtcaagggatggatgggatttggaactcggcgccgccgaggacatcaatgacgacctcccagagcgtcggaaccgaccactgataacggtcgaagtcggtttcaggatcgactcccagggttacataggaagtggccggccatttgtgaacggcgccttttcgcatgagagtggccacgcgaccgtcaccgagcggattcgtcctgtgaggaacataagccgacatcgagtattgctgtccagcgccaatgataaattcttgcctctggcgcagacatacagagcctacaggctcccaaccgcgaccgccgcaggcctggcgagccgaagagtgctcatacccttcatgagtcaattcgccgaggcgcgccgaacggtccacgtaataatttgtattctccatagacccaaccagaaccaaggactcgaaatcgaatcggtgatcgtggatggaagagtgatggaaacaaagccggcgcggcagctccggatgccacacatggaggcgtccggccgggagctggacctggatgaagcccaggccgtgcagcgttattttgtccttcatcggatcagggacggtatccatggataatcctcagtagcagaagtggatgataaaggttacgatggccaagccggtcgcccataggagggcgaaccaggccatggctttgattgtaaggtggatcatccgaagaactttccggcgcagatggggccgatgcccatttcgatggatgcgtgattggtcaactcgcgaccgcagcaggagcattgacccgtcttccgaccgtaggcgactgccgattccattggcttttcgaacatcttcaggatatcgccatactctgtgtcggtgcagtcgcggctcttgatgaacttgccgccagtgatccggccgaggtagatgtcgcccaggacatacagactcccggcgttccggctgttagcgctagcctctttcaccacgacgatgagcggttcctcaccttcgccagccagacgcattttcgggcgcttaatgccagagtctttcgccttctcaaacgctttctcgattcctgaaatgtccagagtcggcgcagcagcctcctgcgcggccactttctcgcgatgtttggcgaggttttcgatggctcgtttcgcagcagcgatctgattctcggtcaacgaaccatatctgtaaagagaatccttaaggctctgggcaaagctgaaagagttgtcagtccaccactcgatgatgtccgggtgagcggcttcgaaagcctgaattttaaggccgcgatattgctcagccttctggattttctcgatgcgcttttctgccgccttagcacgactcttggcgcgttgctccgggctgctcttgtactctttatatccaacgccgccgcaggcaaagcaggcgcgaccataagacgaagggccacggtacaggccggtgcctgcgcatttggggcacttttcgcgatacagcttcggttccttccaggagttcgggcgggcacccatggacacctcttccagggtcttcggcgcttcgttgttgacctctacggtggcgaagtcatcgcccaggtcttcgaagccggtgaacagattctctgctgcgttcatatcgattctcctgtttggaaagttcgtttcgatgggttgactatactccataaatggaaacgcggtagcactttcgcactaccgttcgtcgggttgctgacgatcaataaatgtcgctgctgatcttgaacccatgctcagcgccgtcgttgtagtcatactcagcatagctgtcgcagtagtcattcagatgttggatgattccaagaacgtcgttagcgaccttgtgacgcttcgtcgcgatggtcttggcaatgctgtcgccgacttccagggtttcggcggtccggcgatggatcaacaaacggctccaaagatagagtcggacccggcgaatcatgtcacgatggcgcctcagtcggctctgcagctcttcaatttcgaattcgcgagactttattactcgtcgaagctgctgaacttccaattccaaatcggccttagtagccatattcacctcagaaaggaaaatcgtctgaggctccaggaagctcgacgattgttgttgagcctgagcggtcgagtatgcacccggccgatcctgccctatggggataatgcctgcacgaaccgtaacaagtgacttctttgacgattcgccatgtcgatcctccacaccacctacatgctggtgggcgcttcgacttcagttttcgttcgtccaggacggcgcgtctgtcgcaggaaaggcagcgagccttaaccgacgtaaccatgagtgtagtcgatcatgcgaatgagtttgtcatccaccgattctctcgacttcaaaccgttcaacgaatccgactggccgttgcaatttccattaatatccatggaagacagaaagcctgccgacactactgtgatgtcaactttgtctccagatttcttgaagccttcgcattcagcgtcgagggccaccaacgcactcgcggccatgttgacgtgactgattaagtcggggaagattacgggaacttcacgagacattccacgaacagtcatcttcagcactacatacttcatactcgctatcctttttgtatgtgaggaaagaacttgctgttttccggatggtggaaacgttcggccgcaggcggtctttcttccggacactgaatcgtcgaaggcgggaaaaccgcgctggagattatcgccgctagcagcgcagcggatgtcgacatccacagggcagtttccaggctgacccgcacttcaggtcggcgcggcttcattcgctccaaccccttcccggctcataagacgggatgctgccgccgcgaatccaattgtcccacatatggttcagaccagtgggcggctgtggcggcggactgtaaaagccgggaacttctgtgctgctgaggaaataaggcgtgcaaacggcccgaacaaccagctgatgtcgctcccacatcttatcaatcgctcttagcatgacgtcttcacactgagctttgctgtcgaaccgtctgctggtatgatccggcatctggacacagccatcgccagtacaaagaaaagcagtggcgatccatactgtgatgcttgccatatcgtcaacctctttggtaggtgagcagattttattccatctgctcgtcagaagtaaagcgcttttcgtcgggataaatgccgatgatgtccgcgtcaagcatccaaatgtccacggacggatcgttgctttcgatctggtacaggtgatacagctctttctcgtcacgcgccgattcgccgcgaggttcgacagccaagatacggccgtgcccttctccatgctcatcgcgatacatgacgtgatctccgacttcatagcattcttttttgacgaggcgcgagcgcgagctgttcggcgattccactacccaggaatcaacaaccgcgcctttcacattgctgtaccacttcgcagatttgtcgcagtcgaacacgcccagaacttcgccgtccttcaacacgatatgtacgataggaagaagaggattcatgttaatctccattggttgataattagagtctaatctgccgaaaagttcccgtaaagaattatttcctcataactgattagttgcgactgttaatgtgatgtatatgtttgaatctcttttgaacgtttgatgtttcccctataataagcgcacacaaccagcaaccgcatggaattaaaatgtttaaactttcctggatattcgggcgcaaaaaggataatgctgcctgttctgaatcggcgccggagaaagtcgcacgaatccctcagcacgatccgctcgaccctatgattaagcttgggaagattcgcggctggaacgtcgagccggagaaagctccggtcatccgtagcgtgaaggattttctggagccgggtctatccgtcgcaatggacagtgcgtatggtgacgggccgaccccagccgcgaaagctgccgctggcggccagaatccctatgtagttccgaccatgctgcaggactggtataattcccaaggattcatcggataccaagcttgcgccatcatttctcagcactggttggttgacaaagcttgctccatgtcaggcgaagatgccgcgcggaacggatgggaactcaagtcggacggccggaagctgtctgatgaacaaagcgcgctgatcgctcggcgcgacatggagttccgcatcaaagacaaccttgtcgagctgaatcgattcaagaacgttttcggcgttcgcatcgcgctattcgtagtggaatccgacgatcctgactactatgagaaaccgttcaaccctgatggcatcacccccggctcttacaaaggtatctcccaggttgacccgtattgggcgatgccgcaattgactgcggcctcgactgcagatccatctgccgagcacttttatgagccggatttctggatcatcagcgggaagaagtatcaccgcagccatctggtggtcgttcgcgggccgcagccgccagatatcctgaagcctacatatattttcggtggcataccgctgacccagcgcatatatgagcgtgtatatgctgccgagcggactgcgaacgaagcgccgctgctagctatgtcgaagcgaaccagcactattcacgttgatgtggagaaggctattgcgaatgaggacgccttcaatgcccgtctggcgttctggatcgccaatcgagacaaccatggcgtgaaagttattggcattgatgaaaccatggagcagttcgacacgaacctgtccgatttcgacagcgtcatcatgaatcaataccaattggtcgctgctatcgccaaaactccggccacgaaacttctcggcacttcccccaaaggattcaacgcgactggtgagcacgaaacgatttcttatcatgaagagttggagtccattcaggagcacatatttgacccgcttcttgaacgccactatctgctcctggcaaaatcggaatccatcgatgttcagctggaaatcgtctggaaccctgtggattccacaaccagccagcaacaagccgagcttaacaacaagaaagctgccactgatgaaatttacatcaactctggcgtcgtttctccggatgaagttcgcgagcgtctgcgtgatgatcctcgctccggctacaatcgacttaccgacgatcaggccgaaaccgagccgggcatgtctccggaaaacctggccgaactcgaaaaggccggtgcgcagtcggcgaaggcgaagggcgaggccgagcgagccgaagcccaagcgggcgccgtagagggtgcaggcgacccagttccggccgcgccacgcggtactaagcccctcgcgaaagcggccgaggaaggggccggcgaggccgctacaccgccgtcgcggccgaaccccagggtcgagcttcggaacctgctgtccgatctactgtcgaaactcgaagccctggacgacgcgcaggctccggacggcgtggacatagagcaggatgacgcgccaggtctgaagagaacgtcaaagccgagcgtatcgggtatggagccttcggttttttcgtccaaccgcatcgtcggccctcgtgatcattctgaactccagaggatcaaggttaatggaattactaccttgatcgaaaatccgcgcggaagtatccggcaagggaaggacgggagctggcgagtccagatgaagcaccactatggattcatcaaaggtacgaagggggctgatggggatgaggtcgattgcttcgtaggcccgaaccttggttcgaaacgggtcttcgtcgtcaaccaggtgaacaaagatgggcaattcgacgagcacaagtgcatgctcggcttcaacaacattaacgacgccaagtctggatatctgtcttgcttccgtccgggctgggatggactcggctccatccatgaagttgatctgcccgccttccgtcgttggctggcaaatggcgacacgacgaagccatttggaggcaagtgatggcgttcaaagcctccaagaaacgcgaacgccgggcgcctcttccagtcggaagaggcaagcccataattccttctgctggaatcgaagcctggtatcgaaagcaaatgaaggatatggccaggctcatgatcgccgattatcgaagtgaaatagagaaggccatatcccagcctgcggccgaacggtttttcgcgaaagatgaatcggtgaacgtcctgttcaagatgactctgcgaagccttcagcagcggtggaatcgcatctttgaaggtttcgcggccaagatcgccccggagttcgtcaatcgggccgacgaagccgcgaccgctgcgactctacatagcctgtcggtggccggcgtcgatcagccgcgagcttcatacaatgagagcgtcaggaacaccctggaggccgcgactacttacaaccataccctcatcaccaacattcaagaggaagtccacgagaaaatttatacatccgtgatgttgtctctgacttctccaaacccagaggaacaaggaacttccgggataacaaatgcacttcgagaagtcggaaagttttctgaaaaccgaatcgaactcatcgcaagagatcaaaccagtaaactttacagttcgttgagtgatgagagaatggcagagaatggagtcgaagagttcgaatggatgcactcttctgcaggaaagacgcctcgccatacccacctggaaaaggacgggaaaagattcaaactgaatgaccctagactttgggaaggtccaaaggccgaccaaggaccgccaggttgggcgattaactgccggtgcagaaaaatcccaatcatttagtcgtcgataggagtgcgatatgccgttagtccatggaacttccaatgaagcccgttctgaaaacatcaagcgggagattgaagcagggaaagacccgaaacaggcagccgccatagcctattccgtccagcgcagcgagaaagggaagaaggcgaaagattgttcgcctgaactcgtcgccgatcttcgcgccctggtagactcgctgtcgaggctcgtgaaatgaaccgaaagacatgcatacgccgactcgcgaccgatgtaatcaaggccaatattaacggcggattcttcagcctgaagtttgccgcagttgatctggccatcatcagcgtctcaatcctgattgctttcggctgatgatgccgcgaaaatccggattctgaataaaaattcgggtccggatagcctcaaattaccgtttctgggaaatatcggtaatttggaaagcctactgccgcaaggctttaacatgctaaattcctaatttccaatttcgccgcatgccgcaaaagtatatagcatgggaaattaggaataacgttctaatagaattcatctataagtaacgttataatataacgtgaatcgatatgctctatacgtattgaaattcaatttttaattggtaaattggtaatttggattagtttaaagattgaaagtcttgcggcagtaggcttagacaaatcccgtcaaatttccgaaaccaagttaccagttttcgcggctgagggaatccggtaattagatcacaatacagattctagtgtaaattaacagtcgcggctacatctaattattgttccgcttatttacccttggatgtcctgcgtatataatacagccatagtccacgactcttcgaattaacgatggcaaagtcgaaaagaaaaattgacgaaaatggatatatgaccatcgagggttgtccaatcagctcttatggcattttccaatattctgccggtcaactcggtcttccgggcgatccgatgcggattgtcaacgtgtatcgtccggagtctgccgttagcgatcctgagtacatcgaatctctgaagaatctcccgctgatcgacgagcacgaaatgctgtcgggattcgacggcgataacgacggcgtggctcccgaagacaaaggcgtggaaggcatcatcacagccaacgcctactacgaagcgccatgggctcgcggcgatatccgcatctattcccgcaacatgcagcatcagctggaaaggggcaaggaagatctgtccctaggctatagttgccgctacactgagcaacccggcatctggaatggaacgccttatgaagtcgtccaggacaagatgcgcggcaaccacatcgccctggtaaaagagggtcgtgtgccgggggccagagtattggatggtctgtgctttgaccatctcagttttgatttcagaccatccgatgagggtaatgaaatgggtctcaagaaagccaagcagaagactcctgtccagcgcgcaggacaagctgctgattcggcggtcgaagagttgcgcgccctgtggccgaagctctctgcatctgtccagaagttcctgggcgaagaggcgcaggagccggagcaccaggaaggcgcagccgctccggccgaaccgaccgacagcgagcacatgaccgagcatccgactctggaaggcgctcaggaagacgacgaagagcacgaagaagcgccgtccgttgtcgatccggccgtggccgccgtcgatccggagcatcaagaaggtgccgcatccgaaatgtccggtgaaggcgaagtcgccgaactgatctcccaggtcaaggccattctggctcgactggagggcacggtagccgaagaggcggacgaagagcatggcaaaggtcaagatgtcgtcgagggcttggaagaacagagcatcctcagcggcgcgcaaaccgccagcgacgatggtggtgagggcaaggataacagcgaggaacttcctgaaatggcacagaagaacgcgcaagatgctgcaattcgtggtctctatcgcgacattgctgctaaagatcgcctctacaagcgtcttagttccgtggttggtgcgttcgatcaccgagctatggactcggctgaagtcgctgtttacggcgtgaagaagctggcgatcagctgtgagaagggccaggaagttctggcgctcgacatgtacctgaaaggcgtcgaagctgctcgtggcgcggccagccgtcaatcgaaagcccaggattcggccagttctgctccgcagtgcgccgagctggacagttacctgaagggggagtaacccatgttccagaaacaagtctatcgccagtacactcctggttttcctggtgatctgatcgaggacggcccgaagcgtgcgcggccgggtcggatcatggcgttggcatcggtcactccggccgcgactgccaccggccccaaccgcatcagtcgcgcgttcggttacgcaggtgatgtcggctccctcggtgaaggccagccgaagaccgttgccgcgcgcgcttctgaagtcgtggtcggcggcgcaaccttcttcggcatcctcggccacccgaagcattatgctctgtacgggtcggccggcgattccctggcccccagctatgacctgcccgatggctccgaaggcgagttcttcgacatggccaccggcctggtcgtcgaaatcttcaacggcgccgccaccgccctggatttgagttacggcgatccggtggcatatgtaccgaacaacctgcctaccgccgacaacgccctgggcctgccggccggcgccctggtcggtttcaaggctggctccatgccaaccggcctggttcaaatccccaacgcgcgtatcgtcaatgccatcagcctgcctgcccagtcggcggggaatctggtagctggcgttaccatcgtccagctcacgcagtaaggaggcgtcatgagccatatcagtaagacccattcgcgcctcgcaggccgtcacgcaaagccattcgacctgaagaacgtcacccacgaagccgtggccgccctgggtcgcatcggcctggtattcgatcacgccgtcgtccaggaccagatcaaggccttggcgaaggccggcgcattccgttccggctcggccatggacagcaacttcaccgccccggtgaccacgccgtccatcccgacccccatccagttccttcagacctggttgcctgggttcgtgaaggtcatgaccgccgcgcggaaaatcgatgagatcatcggcatcgacaccgttggctcctgggaagaccaggaaatcgttcagggcatcgttgagccggccggcactgcggtggaatacggtgaccacaccaacatcccgctgaccagctggaacgccaacttcgagcgccgcaccatcgttcgtggtgagctgggtctgctcgtgggtactctggaagagggccgcgcttcggccattcgcctgaacagcgcagagaccaagcgtcagcaggcggccatcggtctggaaatcttccgcaacgccatcggtttttacggctggcagagcggcctgggcaaccgcacctatggcttcctgaatgaccccaacctgccgccgttccagaccccgccgagccagggctgggccactgccgattgggcgggtatcatcggggatatccgtgaggccgtccgccagctgcgcatccagagccaagaccagatcgacccgaaggccgagaagatcaccatggccctggccaccagcaaggtggactacctgtcggtgaccacgccttacggcatttcggtttctgactggatcgaacagacctatccgaagatgcggatcgtgtcggctccggagctgtccggcgtccagatgcagggccaaacgccggaagacgccctggtcctcttcgtcgaagaagtggacgcgtccgtcgatggcagcaccgatggcggcagcgtgttcagccagctggttcagagcaagttcatcacccttggcgtcgaaaagcgggcgaagtcgtatgtggaggatttctccaacggcactgccggtgctctttgcaaacgcccttgggctgtggtgcgctacctcggcatctaaccgatgctgactcaccaaaggccgggcttccggcctttgttcactctgactctgactcggttgtaggggccggttagagcataattaataggactacgccaatgactgtttacatcgtttccgcaatgactcaatccgtgtcttacaatgcgtatgacacctctgatccgtccaaccctcgtctccagagaaaggtgctgattcgcggccgcgctggcattgcatccgaaacatccggcttcggcgacatgatttccgacgcatccgggcgcccgatctggacgccgcagggcgattgcacggcggtgagcgattccgatttcgaactgctccagaccaacaaaatcttcatgcggcacatggagaaaggttacctgcgagtcgtgaaaaccgacatcaccaatgaccaccagcggattgcgaaagagactcgcaccatggagcgtgatggttttcagcctcttgattctgctcgcctgaagcagaagattaaagtgactactgccagcgcttcccaggaacaagagttccgggtttaaccgagggtttcggtatggtgattttcgacgagcaaaagtttcgcacgctttttccggagtttgctgacccagcgtcctatccggctgtgcgcctgcaactgtatttcgacattgcgtgcgaattcatttctgatcgagattctccataccgaattctcaatggcaaagctttggaagcctgtctgtatcttctgacggcccacctcctttcgctgtcgacgatgcaagttcagggcgcggccggtggcggggtcacagcaggtgggacccaaggcggtttcatcactagcgctacggtcggcgaggtcagcgttgccaagctcgcgccccctgccaagaatggttggcagtggtggctttccgggacgccttacggtcaggaactgtgggcgctcctgagtgtcaaggccgttggcggattctacatcggcggccttccagaacgccgaggattccggaaggttggagggacgttctggtgatccctggagcgaatctgctgcgtatggcatttagcgtcataggaacgcagctcgttcagtatcgcaaattcgagcagaggacgaagaatagccaggcgcagtacgtttctgtgtttggcgagccattccaattggccgcttccatccaaagggttcgtcgcgatcagtatgtccagttcaatctggagtttcaacgaaattacgtcatgatcttcgccaactttgagatggttgacttggatcgagatttggccggcgaccagtttatctggaccggaagagtttttcaactagagtctcaaggctcttggttttatcaggacggctggggagtctgcttagccgtggatatcggtacagcaaaactagctgaagacggaatcctgactttctaggtggcttatgttcgacggcgaactgatagaaaaattggtggtcgagcttacttccgccatgacgtcagccaaagaaactttgcaatttcctgatttcgaggtcgtgcagaaagcccagccgacccaacagggcacgtcaaccaagcctgcaatcttcttccagaagctgtttgacatccctcgcggctggccggcaaccgattggtatctggacaacgccgccagaaaatatgtagaaattactcggcagcatgtcgagacgacttttcagataagttcccttcattggcaaaatcctgagctggatcatgtagtaacggcagccgatatcgccaattatgtgagagcttatttccaggctcggtccaccattcagcgagtcaaggaactggacttcctcatccttcgcgtgtctcatatatccaacgaggcattcgaaaacgacaatcatcaattcgaattccacccaagttttgacatggttgtaacttacaatcagtatattcgtctgcacgaaaacgcagcatattcggccgatggggtgttgataggcatatgagcctgagacgcgattcagaactgatcgccgcgcacttgcagatgttaagagcaatgcgcggcaggtccgtttcggccggatggtattccaccgctcgatatcctgataaggcgggcggatcggtcggaatacaagtcgcgagaatcgcgcgcctcaatgagtacggcggaactatcgaccatccgggcgggaccaggtatattagggacgccattgttcggggtcggtttgttggcgttcggttcgtcagaaacgattttccgggagaaaccgaggtaacaaaacctcacaggattacaatcccggctcgaccgtttatgcgatatgcttggaacttattttccgcagatcgcgcagcaattcagaatcgaatagccatgaggctggccagaggacaaattacgccggatcaagcgcttgcccagatcggcctggcgttggaaggatacatagccagaagcataaggaccgggccatgggtggctaactcagcatctacggtcaggagaaagggtttcaacagaccgctggtcgatacggctcacatgctccagtcgattagcagcagagtaacataaaccaggagatcatccagtgatcagtcagagccgttatatccggatcatttccggcgtaggcgcaggcgctccggtcgcaggccgaaagctgattctgcgcgtcatgaccaccaacaacgtcattccgcctggaatcgtcatcgagttcgacaatgccaacgcggtgctgtcttacttcggcgcccagtctgaagaataccagcgcgctgcggcctatttcaagttcatcagcaagagcgtcaattccccgtccagcatcagcttcgctcgctgggtaaacaccgccatcgcgccgatggtagttggcgacaacctgccgaaaaccatcgccgatttcgccggcttttccgcaggcgttctgaccatcatggtcggcgcggctgagaaaaacatcaccgccatcgatacgtccgccgcgacttccatggacaacgtggcgtcgatcatccagaccgaaatccgcaagaacaccgatccgcagttggcccaagccaccgtcacctggaatccgaacaccaaccagttcaccttggtcggcgctaccatcggcaccggcgttctggccgtggcgaaatcggccgatccgcaggacatgtccaccgccctcggctggtccacctccaacgtcgtgaacgtcgccggtcaggctgcagacctccccgacgcggccgtggccaagagcaccaatgtcagcaacaacttcggctcgttcctgttcgccggggcgaccctcgacaacgatcagatcaaggccgtgtcggcctggaacgcggctcagaacaaccagttcatctatacggttgcgacctctctggcgaatctcggcgctcttttcgacttggtgaagggcaactccggaaccgcgctgaacgttctgtctgcgactgcctccaacgacttcgttgagcagtgccccagcgaaatcctggccgctaccaactatgacgagccgggcgcttcgcagaactacatgtactatcagttccctggtcgcaacatcaccgtgtccgacgataccgttgcgaacaccgtcgacaagagccggggcaactacatcggcgtcacccaggccaacggccaacagctcgcgttctaccagcgcggcattctgtgcggcggtccgaccgacgcggtggacatgaacgtctacgccaacgaaatctggctgaagtccgccatcgcccaggctcttctggatctgttcctgaacgtgaacgccgttccggccagcatggtcggcgaggcgatgactctggccgtcctccagccggttctggacaaggcgacttccaacggcactttcacctacggcaaggacatcagcgccgtccaacagcagtacatcacccaaatcaccggtgatcgtcgcgcctggcgtcaagtccaaaccttgggttattggatcaacatcaccttctccagctataccaacagcaacaccggcttgaccgagtggaaggccaactacaccctgatctattcgaagggcgacgcaatccgcttcgtcgaaggatcggatgtaatgatctaacggtttgcggcggactcgaccgccgcaaccttccatgaatggagtgaggaataagcaatgatcaacatttctgcgttcggctcgattgcccaattcacggcaagcagaaccttcccgaacggattcaccgtgaccgagttcgctgatgatgcggaccccatcgacagcccgccgttcactgcggctgataccggcgtcggcctcaatggcgatatggtggtttggaaccgggccaatatcctggaagtcgtcgtcaacgtcatcccgaacaccgagggtgagcgcaacttggccgtcctgctggatgccaaccgcaccggaaaagacaagtcgggtgctcgtgatgtcatcggtctggtcgtggcgatgccggacggtagcaaaatcacctgtaccaacggcactcccatcgacggcgttctgatcaatgcggtggcgagcgttggccgcctgaagacgaagccatatcgattccgtttcgagaaagtggtcaaagccggtactagctgatgaagaagattccgctgacagcagtccctaatcaggcgatctcatttaacgccggcagcagctattggaagattcgtctgtaccagaatctggatatgatgaatgccgatatcagccgcgacggcgtgatcgtttgccatggggtccgctgcttcggcggaattccgcttctccagtatagtcaccagtatcgacccgactatggcaatttcgttttcgaccgtgacgccgattggacgttgttcggcgacggcataaacctgttctatctggacggtgtcgagttcgcagaatatcaggcgctggccacgaggaaagaatgagcacatcaacgatcagaaccggggcgaacaatgatatccttttggacgacaacggaaacatggtcattctcagggatgtagaggcgtgcgcccaggatgttcgggcggcgatgctcatgcgcaccggcgaaaacattttcgatgtgaacgccggcgttggatattttgaatatatcttctcgccgcagaagagctatgatgacgctcgcaaatccatcgctgatgcgattttgtcatcgccggacgtgaccggcatcgagcaacttgacatcgacatcaccggtgaagtcttcggcgtcgatgcgaaagtcatcaccatccacgggcctgtaacagcaggagtttgaaatgagtaccatccgcatccaatacgccaacggcacccaactgttcctggacggcaaaaatccgccgctcctggacccgctgccttctttcaacccgtcggtcgaagacctggaagacctggaccgcgaaaagaacactggcaagggcgactcttcgtcggccggtattcccgttcccccggtaaacgtcgatccgaatgtcgacaacggcggggccatcccagctccggcatcgaccggtgcacctgcggccggatcggccccggaaagctctcaggaagcccctgcagagggccaaggcgacgagaaagggtccgagacgccccagactacttccaaggaagaaaagaccgaggaagaggcctctacggccgctaaagaggcctccgctactaccaagcccacggctcgcaaaaccaccagcaagtaaggactcgacatgatcaacgtcagcggcttcggcactggaattgtgatagtttcaacctcgtcgttcccgatggggttttccttgtcgaagttcgctgatgatgagagtccgatatcatccaaagagctggagccgttcgggtatgagatgctttacgatggcggtctgtttgccttcgataaggcggcccctttggaagtgtccatatccgtaatcgcagggagcgaagatgatattaatcttcgcatccttctaaattctaaaaagggatcattccgattccttccaggcgtcatcccagacatgacgactcttgtggctactcttcccgatggcggccgcactgttctgtccaacggaaccatcattaagggtccggccatagataccatccagaacaccggacggcgcaaaggcaacacgtatacttttgttttcggcaactatcttggcgcccagactgcgcgccaggctatttctaacgttattcaatcggttctggaggtgatctgatgttagggattttcaccagcctcctaagctcgcggtctttttcgattgtcgatcagaatacaaaccagctagttgctgcggatttgaggataagccgggttaacacccggttttcttctgtagggcagcgccacatgctggaagacggtacgacaaagatggactccagaacggtccatcctatggagatcatcgttgaggtattctgcccttcaattgatgtcgtcgatcagattaatcaactgctcctggatcgcgatacgctgtacaaagtcatcactcgcggcatggtattcgaacgaatgatgtgtaccagcgaagcgctcaatcagacgccagaaatgatatccgcaactcctgcgcggctgacattttcccaagtgctcgttcagaatccaaaacctatcatgttcaggaatgctggagactcgtccataatcgaccgagggttggccctggccgaagacgttgtgggctcggccagtgatctgttcgactacgcagtgaacggcgtccagaacgccgcagacttgttctgaggtgtcaattgaactctttcctcaaggccattctcaacacgcctactctcactattcgtgatgatgtaaccaaacttcctgtttggaagagtctccaagtcaagaaagtggaaatttattcaccggcttccgtggtgtcgaagcctttggcaacgaaagaccagacggaagctcaggtgtataccgaagcgctggacattgatgtgaagaacgggaagatcattcagccagtgcggcttcgcatcaacgctatttgcccagacctgtccacggttgaaagtatcatgaatgctttcaatgataatacctcgactttcgccatcacttccaagtcgatattggctgataaaatggccattatgactctcgatgtagatcaatctccggacatgctaaatgcggctgagatcaacatggagtttgaacaggttgagcctccagtattgaatgaatttgatccggctttctctcaagatcgcccaacttatggcgtgcagattcagtccctttccgatgcaaatttgctagacttgggagccaccggcgattcgatatcttcggccgcaaaatcgctatataatcgcgtgaccagttatttctgaggatgtatcatgcttgaaatcaaccttcccgatggccgccaaactcgcgtacaaatcgaggcgtggtcggcattggatggctgggaactccagcgccgtttcgtcgagttcgcagtcagcaaggatgccgacttccgccgcgctttcaccatggaaatcctgagctatgccaaagtcatcctcggtaacgatgactccgaaattccgttgactactgctgcggtcatcaacaaccacctcggcaactggaagaacgttgaattcgtcttcgattccgtcctcaagcacaacggcatcgatccgacaacgcacgccgaccgcccggactattgggaacaagccggttcgcagatggcaatcgcatttctggccgaggcgtccaagctcattgggccagctatgaaaatcgccgaaggactcgccagcaagccggagtaattcatgtctagtgatttggatgaattcatacttcggtatgaggccgacacagccagagccgaacgaaacctggaacgcctccagaatcagatcaggcgcgtaaacagcgcatcgactagtggccttcaagatctgcgccacttcgcagacggcgctgcaaccgaactcggccgcgtggttccgcaggtggacgccgtaacgagcgcgattcgcgggatgaacgcccagctcgcgataggcgctactggcgtggccctggtcgcggccggcgtcaaggcgttcatgaacaccagggaccagtacaaccagcagcgcatccaggcgatggatatcggtatcgccccggcgcgactggaagagtaccagcggaaactggcccgccagtctggaggaacgatcagccgcgagcagggcgcggaaatgaccaaaaatctggcagatactttccggcgagcttatcgcgatatcggacgggtcggcccagaggcgcggattctgcgcatggccggcgtagatgtcggaagtttccagaaaggcatgaggccgctcaacgacatcatcactgagctggctacgaagatggccaagctgaaaccggacgagatttcggcctatgctgatgccctcggcgtctcgcgagactatctgagcaccctggcgaagatcggcccggcaatgggcaaagtcactgaaatgacgtcagaagagcttcaggctagggtcaggggcgagtcaaacatccagaagttcaacgacgctttggcaaacctcaaccaaacgttcacgactctggaaaaccgtgttggcgaaaagctcgcgcctgcattcaccaagctgatcgaaatcatcgacaaaattgtccaggccattcccaacgaagtggaagaattcgccaaggacacgaaagcccgctgggacgatggaatcaccggaaaggctacggtgggcggcgatattctgtcccttctcagccctggtgctctgctaggtcgcctggcttcctggggtactcggcgcggcatggaagaggccggattaatcgacaagtcgaaggtcccaggctcccaaggtcaaaccagcgaagacctggccaagaaacaggaagaccaggacaaagctacgaagtcgatgaaagagctggagaaattggccgaccagactacgaagtcaacgaatgattttgcggtggcgatcaacatgttcagcggagccgtatcatcgttcgccaatgccgttgatgagcgtcaggcatgggcggcatgggcgggggaaatcgggcgcgcagttggcatgggaagcaccgcgccgacttcgcgagccacaggggtttatccgcacgcgatctacgaccagtcgaagagtggcgcggccggtcaagtattcggcgagcctatcggcgcccagtctctgcgtaatcgcatgttctcgccgcagcgcaaggccgagccgataaatgtcccatcgtacatcaatgatatcatcaaagatgcgtctaagatgtacaacattcctgagctggacatcaagaagctcatatacacagaaagccgattcaatgccagagcgaccagcgaagccggagccaaaggcctcatgcagctgatgccggaaatcgccaaggcgtatggaatcaccgatgtgtatgacccacgccagaacatcctcggtggaacgcgcctactgcgggaaaacctggatcgggccaaaggcgacatgcgattggcactgacctactaccatggcggcctcgacccgaagaactggggaccaagaactcgcgcatatcctggtttggtgatgagcgcaccaattgaactgatggaggaagcgcagcgcaagcagaaggctgcggccatgactgtcgccaacgagacgttcgcaccagaaggtggcgacatggacattcgcccctatgacggcggaaggctggagtctccggatcaaggcaagaaggaagatgagcgccgcgaagctcgtagatatgacgaccgagtggtccggccggagattcgcatcatcgaccgcatgccagaccgcagtgacggcgagattctcaaaatgtctcagcgccaagacgctgaccgggcggactctggattccggaaattcccgaaccaggtccgtggtgagaccaagcagaacatccagacccaactcactgccggagccattgcccaagtcatcggtgttaatcctaaccaaattatgcgccgcgaaatcagccgttctgacttgctgttcggatacaaccaggccatcttgggtaaacagcaggaaatcaaagcggctgcgacagaggccaacaatgtattcctttctccagccaaactcgccgaagctactgccaaggtgaacgcagcatcgcgagaaatggatattctcaggacgtatggggagaagcttctgaagagtgctccggagcgcggccaggaactgacaatcggtcgaattgatatgctagtcaacgtcaccggcgcgaattctccagaagaggctcgcgaaatcttcagcaggcagaccgcagaacagctgactaccgccatccaggactcccaaaacgattccgcaactaagatactctactgatgaaaaagagaattctgcgagtcacgttcaatatgccctatggacccgaaatcatccgtgaagacctggatgttcgggttcggattatgaaggctgcattgcggattcaaaaccgagctaccctggaaatctttggcctcacgacgcaattgcgcgagtctcttctgtcgcagttcacagcgtggaagcaccggcagcgccaagtcggaatggaagacgagctgatgatcagagtatcggttgaggccggctattccgatcagggccgcgaacaagtttccagagtatttgtcggcgaagtggcaattgtcgatgtcatttcgccgccaccggatattggaattcgcatccagtgctacacaaggcaaatcgataggacgaagaccattcgaaatatgccgccagccaacacgacgtttgttaagtttgtcgaatggggcgcaaatgagatggggttgaacttcatctgcgataccagctacaatgatcaagttttgaagaatccgggccggtcgatcactgtcgcgtcggcaattctggcgtcaattcaggatatgtacatgccggatgtggctgcgttcgtcgatgatgacattttgatcgtgaaggatcgggacaaagtaattcgtccggatgaagtttccaacatcaactcattcgtcggcatcccttcatggtcggaatggggcgtggaatttcagtgcctgtttgaaccgtcgattcgcgtggctggtggtgtcgcggtcgaatctctcatgaacccaagcgtcaacggcaactatgtaatcaccgctctagagtatgatttggccagccgggatcggccgttctatatcaaagttatggggagcccagcagcgtaatggccagggaaatcaaatcattcaacatgttcggcgtgcactacaactcgcggcaattctctgcggtcgatggactcaggatgatgtcgggaatccatgatgttcctccggaagaattgctcaaagggaccgacgtgttggcccatacggaggaacaaccggaaggtgtctggcttcccttgaccgctgcgaacataaatctttatgtcattgaccgggcgaacgtaatagctcccgtacaagtgcttgcgcttttatctgaattggtcatagattggaactttggcttcctcaaagattggacaggggtcaaaattccagccagatttgtcgaagatatcaaaagtgtgaaaacagcccattcaccttctgtggtcgcaagtttggtggcgaatgggtcagcttctatgcgcgagctggaagaatattattcgactcaagatgcctttaagatgattgacatcatgacggcgaagagcgtgaatgaggctctagcgtccgaagcatcacagaacagaatcaaaaagggataattcctaagcgggcctgggaaggctatactagaccggccaaatcagaggctttcccatgtccaatattcctctaacatccgcaaaatctaccgacagaacgcgactgatcgccgctcttgacgctcggtcgcggcgggatgcgctcgactttgaagtcatgattcccgcccaggttgttcaatatgatcgggccgaaaatatcgctacaatccaacccctcatcacctgggtcgatacggaacacaatgccgtccagcggcatcagctggttgatatcccggtgatttccatgggcgctggcggcttccacataagtttcccgatccagcagggggatatcggctggatttacgcggccgaccgcgacacctcccagttcttggagtcgctatcgatgtcgaagccgaacaccggccgcatccacaaatttgagcatggtatgttcataccggacgtattccgccgatataccatcaattctgaagactcgacagcgatggtcatccaatcgactagtggagcgacccggatttccattcgcggcgacaacatcaagatcactgcgccgtcgaatgtcaccgtggatactccgcaggcgaatttcactggaagcgtgactatcgccaacaccctggttgtaaacggcgtcaacgtgaacaaccacggccacctcgaaaacaacccgcctgatgcccggacgaaaggcggcatgattgcctaaggagaatttcatggctagttttgatttttctgatttaacagcgggggggggttgtaatggctaattatgactacatagtagatactggagtcatagtcgccgatactgctgacgttttgaaagacgttgaagcggaattcagagcggccctcggcgccaatatcaacctggcagcctcaactccccaaggaactctggtcgcggccgagaccattgcgcgttccagcgtaatgaggaatgaagctcgcatcgccaacaccatcaacccgaacgtgtctttcgggacgttcctggacgccatctgtgcgctgatggggatcgagcgcggctctgatctttcgacgttcggctatggcgtccaagtgaccggccgcagccagacccgaatttctaccgggtcgcgtgtgcagactccggccggagcgattttcacggtcatgagtgacgttctgattccggcaaccggagtcgccaccatcgacgtaaaatcgcaggactatggaaacatccctcttcccgtaggaaatctgatcatcatcgatggaaccatcggttgggccggggcgaaagtcatcgcttcaactcgcgtcgatcctggcagccgccaaatgaccgatgcagaactgaagaatgctcgcgtcaatcgtctggcgatccaaggtcgcaactcgactttggccattaaagcgtatgtcagcgccgtgcccaacgttacctcggtcaacgtcatcgaaaacaataccggcacggttcaagtcgtcaacggcgtatcattcactcttccgtatgcggtctgggtctgcgtcgccggaaatccggataagcaggccgtcgcagatgctctgtgggccgcccacaacggcggaactccctgggactatggctcggccaacaacggcgtcccggtggatgggcctactggcgttcctgttcgcgatccggcatctggtcgaaagtatgtcgtgaagtggactactccgatcatgtatgacggatatgtaaacgtcaccgttcagcaaggctcttcctcggtcgctccggaagcaatccagaacgcagttgtgaattacgcccaggggaaagtggagggcgaagagggattggtcgtcggcgcgagtctgtctgcctttgaagtggctggggctatcgctcgcgagattcccggcatctacatcaaactatgccaggtggcttgcgtcccggctggatcgccggccccggctcccggcgacttctcgcctgaatacgtcatgagcgcattcggtcaggctaccatttcggttggtaacgttagggtgactttcgtatgactctgcctgcgtacaattctgatattcaacaggcgctgaagtggctccaaaaccaggcccctgggatcaccggcttggttcagcgaaaggctcaatggtatgatcgtttcagccgtcagttttgggtgaactgggagcgcgacgttttcaacttgaagaccgccaacccgttcggccttatggtttggtgcatcatcctcggcacgccttcgaaagggttcggcctgtatccaaaaaacagttcttgggcattcggtcggctacgccagaacttcatctatagcggtacacaagttccgccaccggcagacgcatcgccgggcggcaacttctacggtggcggcaatgccgaaattctcaacttggacgaaatcagaaaagtgcttcagctaagatatgtagcgctgatttcgaacggctcgattgcatatatcaatcgcatgcttcgctacatattcaatgatgatgagccgtgggacgaggcgaccggtctgtacttctatctcatggactcgaccggcgagaatggccctgtggagaacttggccatatatcggaaagattgggaaggtatggtattgttgtccagttcgcccagaacgaaccacgtgctgacatcgacccctgccagcgacgtcgattggccgggagtcgatccggccgcgagcggtcttccggtaacggtcgaaacggcgtccgctacggccccggacggctccgctacggtgtgcaagcttactaagccggccgggagtaccgcttacgtctccgcgccgatagatgggccgctggggtccggtagcactgtaacgttctcgttcttcgcgaaagccggctccacccgtttcattgcaattcagtcggctgccgatttccccagtcgagccgatgccgttttcgacctggattccgggaacgtgatcagcgatcagatgttggacagcagcgtggtaagcgcccgaatgattcgtctggaaaatggctggtggcgttgcgttctcacgaccaagaccgtcagctcttcgttccgcgctgcttacgtagctcctgcagaaaccaacttcagctggattgattcgaattccagcgcggcgattgacgtgcttatctggggcgctcagatcgaactgggtgatactccaactggatacttggagactaccggggcgcccgtgaccatcaccgattatgctttgcagaacgcccagaccggaacagtcaagttcacgcagccccttccgacaggagtagaagcgtattggactggagactggaaaggcgggtctgcgaccgagccggccagattcgcagtaggggatgggactcaagatacattcaatctgtccagccctgcatacatcggcctacccactagtggggcgttcaagctagaatacagagttggtccggcgcttaatttgtcgccgcaattgatcaacctcatgaatgaccgggcggtcggtatcatgccgacttgcgccggttgcgatgtaaaagtcattcaggagtaatgacgtgatcacacccgaactgatacccagtccgtttgctgcgcagggcgacaaagacccgatcccgcagacctcttccactggttttgccaaccttcgcgatggctacacgccggactacgaaatcagtctggcgtcgaacaacccgcaggccaaagcggtcgagcggaaaattcaaaaccaactcttcttcatcgcgacccagaacgcacaggcgtggcagcgacaaatggcgccgccgtggtttcagggcatgcctggcggctacgaacagaatgcagaagtcgtgcgcgtcggaaatgacggcataatgcggcgttatcgctccatggtgaatgccaatgcgagcgaccctctcagcagcacgacttgggaagaacaacccgcatggtcggtgatgcgctccaacatcccgatgccggccggaggcccaggcctatcttctggcggagaagtcatcacgaccggccgcaacttcaacgacctgttaaatgggacgtgggagttcttctctgattcagtggttatcgcttctcagaatgcccccgtatatccggcttccgctggtgccgctgctggcatgttggaggcgaaatcttgggtgtccggagccaatacgttctgcgtccaacgctacactgatcgcgtcgggaacgtcgctgtgcgcgggcttaatgccggagcgtggaccaactggatgtatgcggtaaacgtcatggcccttcaacaaggtcgggtcacctatggagtcgcggccggatcggcgaacgcttacacgttgacgctagttccgcagctccaaggcggcctggtggacggcatgattcttcgtgtcaagttcaacaccatgaacaccggcgcctccaccatcaacgtctccggatttggcgccaaggccatcgtcggcgcagcgaacttcccgttgaccggcggagaactcggtcaaggcctcatcgctgagcttgtattcgacgccaccggcgaccgctggaggattctcgcaggcgcgccacgcatccaagtaggcaacgccgatcaagattatcaggccccaagctggaaacaggtgaaggattacgtcgcgtcccaaaagctgactgaagtggactgggctgacgtcgtcaacaagccgaacgtcgctatccaagacactacgccgtggttcgccaatctggagttgtctgacgctcggcctttcatcgatttccacttcaacaacaaccgcgccaaagacttcgactatcgctttatctctgaagctgatgggtcgatggcgttctattctcgccaggggtccgctggtcctacccaggatatcctgttcagcaggtcgaatgttacattcctccagccgcgactggatgttgcgaaaaacctcgcgtacatcgcgaactctggccccctttggcagaacaccactgccgatcagcctggttggaaattcaccttcgcacaaggcgtggacgccaacaacaacgcggtgatcgcagtcaataccaccaatcctgacggctcttatcgctcgcaaatcatgcgatgggactgggcgtccacgaacgtcatattcaacaatcgccctctgtttgctggacaatatgtcccttgggactccggaaactttgatccggccaccaagctcactgtcgggactaccaacaacatttcgggaccgaccggaattcgcaataccaccagcaataccggaaatatgaacacctggggctccagctccacaactgcatcgtatggaaacgcaacccttcaaatcttcggtagagggggcggcgagcctgcggccatctacttcgacaactcccaaaccggctggtatttgggcatggacaaggacggccagctgaagcgagcaggctggtcgctcggcaataactcctatgtggtcactgacgagtcgaatattcgtttccacgtgaattctatggctggcactccagtatggggcggaaacgaattctgggggccgtggaacttcaatccgaacaccaagttgaccatcaaagccggcacgcaggaaactagcagcactgcgatattcagcggaaccatgccgttcgccccaatcgcgtctctgtccgactattcccaggcgccattgacggtttacaactcgccgactggtccatctgctaagcctgccgttatcgcgttcattcgccctggcaactggggcgcgttcttcggcatcgataccgacaacaagctgaaatggggcggcggatcgctcggcaacagctccagggaaatcgccgattccagcaacatcatgaatctttgggcggccaacccgaccgcgccgacctggaatggccaaaccatttggcgatccgggaactttgatccggcaacgaaggtggatttgaacgccgcgaacgccaccaacggaaacatgatcttcaaccgcatcgccggaactggcagcgggatcgcctcttccggccgcgtcggcgcaatcagcctccagaacggcgcaacggcaggcgcggccgcagcagtaacattcgagcggggcggtggtttcttcgtcaacttcggcttggacaccgacaacgttctcaaagtaggtggcggaaacctgggggcaaacgcctatccggtcatccacgccgggaactacaataactacatcaaccaggcgctggttcaggtaggtcttggcggagtcggttcctatggcattttcgcggttctggacaatgccgctccaaccgcgaccgttcaaccaggagtggttgtggacggctccattctcatctactcgtcttgctccgcaaactacaatagcggtcaaagacctgccggaacttggcgctgcatgggctatgtagtcaaccgggacgccaacacccctgactccgcgacccttttccagcgagtgacgtaaaatgaaatggacgcggatcagaaacccacgttggctggacgcagtaaacatccacgccatggtgactttcgagggaatcggtgaagtgccgttcaccgccaatccgcaagacgttgaggcccacggaagggccatctacgctgcgattctatctggggagcacgggcctatcgccccggtcgattcgaagcgggagaaggccttgcaggacgctatacgagccagggaaaagcgggctatccttcgggatacccgctggcccatagatcgccacgacgagcagagacggctgggtatcgaaaccacggacggccctgggctgatcgcagcccttgttcactggaggcagcagattcgcgactggaacagcggggatcggccgcgacttcccatggctctgaaaacaatgttcaaaaatcaggagtactgatgaaaataacgaaggatattttgatcaccggaaccgggtgtaccatggatcgggcgatcaagtggctggatgacatccaggcggccatggataagttccacatcgagtcgccgcgagccattgcggcctacctcgccaacatcggcgtcgagtccggtggattggtgagtctggtggagaatctcaactacagcgcccaaggactggccaacacttggccgcgccggtacgcagtggacccgcgcgtccgtccgtatgtgccgaacgctctggcgaaccgcctagcccgcaatccggtcgccatcgccaacaacgtgtacgcggatcgcatgggtaatggctgcgagcaggatggggacggctggaagtatcgcggtcgcggcctgatccagctgaccgggaaatcgaactatgccctgttcgccgaagactccggtatggacgttctggagaagccggaactgctggaaactcctgccggcgcgtcgatgtcttcggcatggttcttctggcgcaatcgctgcatccccatggcggaatccaacaacttctccatggtcgtgaagaccatcaacggcgccgcgccgaacgatgcgaaccacggtcagctccggataaaccgctatgtgaagaccgtcgccgcgatcaatcaaggctcctgatctgctccgaaagaaaaggccgcttattcagcggcctttttgctttccggctttgcctcttcaatcttcctgacttcaataggcgcgacagactcttcctgggtgaccgagtccacatagttccctagcgaactcagaacgccgattaacagcgctcttaccaccttatccttgactgtctcgcctatgatctttgtcagaacggatatcaactcttcccggagtcttgggcttattcttggccgaaaacgcttgcgatgctctttgcgtttcatgtttagtcctctgtttgcggtcttctcctcaccccgataatagcttggggatgcgctgtgttaatcggaagggtcgggcgttattataactcgacgaaaatgctcgcgcttaactgtttaacgatacgcaccgcgatattaaatcgccttctttctggccaaggaactctggcgcccgagtccggtctaaggcttaatttgtcgacattaaaacgagaaaacccggatagcctttaggataaggcgtccgggtttatttcgatctagtgtccgctagaatcagtggctcgcgccccatccgtccaaccagcagtcgaagacggcatggcgcggcttatccttcgcaccatgcgggaaatgcgtgaatcggatgacctgaccattgagggattctctgtccttccagagacgctgcttttcatcgtgagtgatgctggatgccgaaaccctgaatgtctgcccaggccaaactttttcgttgcggcagacgaacgaaccgaccattccggacggaacaaggttttctgcgtggctggaacgggcagtgtagccaagctcatcgatgaaggcttcgttttcgttgatcatcaactcttcgacgccgataatttcggcctcttcggaatcgtaccgcttgaacttcacacaatggccttctttcgcggtcgagcgaccgaacttgtaaattccattcttcttcttgccaatggaaccttcgaagcccaggccgacgtgccgcagctccgtctcggtcatctgttcaacggacgtaaccagctcctgctcgaccaggtggatgcgggtcatttcgaagcgttcccggagttccttgacccggtgctcggccgcgtcgaggcgttcgtcagtcggcattctgggatcggtgaaatcgtcgaacacgtggaacgaccagtccggttcgccatcgcggcggcgaagatcgccggacgatttctgaaagactttcgggtcggtgatgtcgccgcagaccaactcgccgtccaggccgttgaaaatcgggttgctgaggtatttattgatcgccgcgttcgcctgcggcttgaatgatcgggtcagagcgtggccatcgtggatgaaggcgcgaaagccatcgatcttcggcgacatgaagattggcagttggccttccagcagaccgggatcggccatcgatgcgaacatcggtttcatagaattctccagaaagaagcccggcgaaccgggctgaatggcggtaagccggatcagatggtttcgttggcgtgattcagctcggccatgatcgacgcatagcgctcatccgactccttgatgaacacgccgttgtacatcacgcctttgcgatccttgatggtgtcgtaggccgcctggtagcattcgagcatgctggtgtcatgctcttctgccgcgtcgaacagggatgcgactgccatgaccaaactcttgatggcaagccaacgatttccgcgagccagcgagccggccaggtcgccgagtaatttcagatcttcgccgtaggacgggcggcgctcgaccgccaagacgaaggccgacatatggtcgaacagattttcgccgagctgcgcggccatgatggtggccacgaccatgacatcgccgatgccgtctttcacttcggcggtgttattctggatgtaggcttcgcaaacttctgcgaattcttctaccagcttgaggaactgatctttggccgaagagcctttgatcaggttacggtctgaaccccattttaccaccaggtcatggagttcgctattcatgattcgttcgatgatcattctttcgattccttctgtatttgggatttgactgcgttgatgatggacgccgtgctctggcgcgatccgtccttagtggtgccgaagtaaaaggccataacagacttcagttcggcaaaccaatagccgatgatggtgccgatggcgacggaagaagtcgggtccatcagcgcctcgcggccgaatgtgaaaattgcgatgatgatgagaatggaaccggtcagaagagcaaaagttatcgccgggcgaacgaagtcattttgttgcgcagcaagccttctcgccgaatccctgtctgccgcctcggcggcgaactggctgagttcggcttggagctggttttgctcagactgaagacggttttgttcggcctggatggccagctcctggaggcgaacgcgctcggtgctctggagttctgcgaggcgcgctagagcctccggattcgcgtctagagcgctcgcgaccgaggctgggtcggccttcgaccctagcgccgtcgcgacgatagcgccaacggcggcgcctgcaggaccacccaggagcgaccccagggccggagcggccgcgccgatcttactacctatgtcattccagtccatatttcgattcctcaaaagaaaggcgccattacagcgcctttctctggccgttgacgttagaactcttcggcttcagtggcatcgcccacgccaccggcgtcgccgcgcggttgttcctgcttgctgtagtccaccttcacctcaccgccgacgaacgacttgtacagatcggcggccgccttgaagtgatccgggtttttcaccaggccttccagttcgaactggacgccggaccagctgcccttgtcgttcgacatgccgacagtggtcatacggaccaggttggcgaaagtcggcggcgtgcgcaggccctgcggagtctgaactttcttctgggacagagcggtcatgagcttcttcgaggccttgatctgcgaagacgacagggagatcagggcctggccgaagtcgccggtttccggatcgatgacgatgacgtaatgaccacgggtgtcggcgaagtaatccgatttcttgtcgctgaccgagccgtcttcgttcggcgcgtacaggcgtccttcgacttccttgaccttggtagggtctttcatcatttccttgaagtcttcgacgctgatggaccctttgaaaccgccctcggcctcgcgaccagcccagcggatgaactcgcggcgatacgcggccgggatgatcagcagaccggtcttgccgtcgtaaatcttgccggtgacggtattcaggaacatgccggccttcgcgccctcgatgtacttcggatcgtcttcatcgacctgcggcgacatcttttgcagcacttggatgaagggaatggcataggaatctgcgtcagccccttcgaaaccggcgccgtcatacgcgcccaggtccatgaagtcgggaacgtcagtagtcgcgacggcgccgccgttggccactgcaacggccttggtttcttcagttgcttcggaagtctcggttttcttgccagccatgttaggctccttgtttgtcgaatttcagttatttctaactgtgggtttataataacgtaagttgcaactaagtaaagcaaattacatattaagctttgctctttttcaccttcggcttcgtgatcttggcctctttatattcgtggacgccgatgaaatctggcaactcttcgcccttctccaggtactcgcgaccgaacgcctggagggtctggtagtgaacatcgcggttgatggtggcgtcatagccggcttcgatgatcgcttcggccgccttcttcgcatcttccatttctccgcgaccgaattctgccagaactttggtcttgatgatgccgtcgttgtctgtgtcttccagccacttccagaacttcgacttgttctcttccttgacggaaatgatggctttcggctcgacttttaccgtgcggccatcagccaaagtcgtggtcttctggccgagttcctccagaagctcaggaatggtgttgcgcttgagggtcttcagctcttcctctttttcggccagcgccttttgtaaatcgaggatttcgccgtccagctgagacgccttgtccaccaagttcagcagtcgatggccaatgtcggtggcttcgactgccatttcatccatgacgccgaaatagtcaatttcgcccggcgcattgtccttcagatactccggaacttccaattcttgctcgctcatgtcagcctccaacttagtgatgttcccttacttgaactaagtattgagtagatattatgccgcatcttccttgatacggctactgatttacatattaaatttcgtcgcgagtgctaacgtcagcctcgaacactccatcaacgacataactcgcgagattgcgcttccactccaaactagtctggattttctcgtcgatggagtccaggcagatgaggtcgaagtacagaacagagttgacggtcccgatgcgatggttcctgtcttcggactgcatccgcaactcgttgtcttcgtcggtcgtgtagtaaattgccacgtctgcggcggtgagcgtgattccgatcccagctgcggccgggttgcccaggaagacttggacgcgcttggcctgaaaatcatcgatcagcttttctcgttcgtcctctttggtctcgccataataggttccaaacgaaattccttgggtctcaagatacgcagcgatctgaccgatttcatgaatccgcatcgcccagatgatgatagaccgttccgggtcttcctccaacaggccctccagaaggtcggtgaacactgcgaatcgcgggttatcttcgggcggcaggatcaccggttccccataaacgttgatatagccagatgccacttgcttgagtttcgaacgagccgcagcggcgtcgaacgatacatccaacatgaaatcttcgttcttgagcacgaagtggtagtcttcttccactcgctgataaaccttcctttgctcaggcgacatttcgaaatatatgcgcttgtaaaccttttctggcaggaatggtaatgcctctttcttcgtgacccggaagctgtgcggctcgatcagggaccgcagtttgtcgagatttcggaatactggccgccccagatcgtctttctcgacgagctgagggggaacggtcctctttccatccaatttgcgcatgatggctatcattcgtggatcgtcactgggaacaagaacagaaaattcggccacgaacgcccgataggatttcgtcccaagaatgccatcgcgcaaaaattgaaactgcatgaacaaatccgtaggcgctcgcgtcagaggcgtgccagaaagtatgcgacgcgccacggccttctcgcccagttctacaattttctttgcgcgtttcgcctgtgggtttttgatcctcgttgattcgtccacaatcgcgcatactctgaacgtcttgaggaaccgcttgacttcgtcatagccagcctgatggttgatggcatcgacgttgatggcaaatacccgaagcactttttcgtcggagaacgtctcggcatacaggcgatccaaacgcgccctagcctttttggaagtcggtctgccgcgccaatccacgcacagggtcttgactgcgacgtgagtaggaatttcgcgcagaatccagttggtatgtacgcctttgggggcgacgataagcagcgcgtcaacccttccttgcaggaagagcctaactgagtctgccaaagtagtccaggtcttcccggtgccctgctccatcaggtatgcgaaattccttttgttaagggaagcttccagggcattgaactggtgttgcatcgcctcggtcttcatacccttgactggaaaggttttggctttcatttgttctccagatcggcgagaaattgaatgatgttgtccagtccttctgcatgactcgcgacttccaccaggtcgcggctgttaagatcgaacagatcgagcatgggattcagaagcagccaatcggttcctattttcaccagaacgaagccgcgaccgccccagccgatccgctcccgaaggaaagggatttgcccaggctcgaaacagcgcgccattgggcaggtcgaggtgcgctttggccaagcttccagagccttgaactcgacccaaaactggacaccgtgacgattcagacagatcgaatcggacatgccagaccggcgcgtctccaggaaatcgaccaggattctgcctagcgagcgttgcttaaacacattcgcggctttcgtttcgcgatcattcatcgccattcccctcttcggaatctttctcggcttgcgctgccaactttgctttctcgcgctcggtcaatatccgcttgacggccttcacgatgaacatatcgattccgctgagcttccatcctttgatgaggaaccaagagccggtcggcgttccttcggcaatattcttcccgtactgaatatatttttcagggcgaatcctgaaacgaatcggttggtcaaccgagtcatccacgcacatcaaatcgaggaactgcgactggcctttgtacaccggattctttccttggtcagccctcttcttctggcggatcggttcattctcatccgacagaactttcttcaccagcttgacgataactaggccatcgtcgccatcgcggatatcccgaatgttctgaatgggatttccggaagtcaccccaaccaactcaggattgtcataggcatgaccccagagtgtgtgagactcgttcaaatccgcgaattgaacctcagaattggacaaactcgcggcaactttctcccaatcctgaagcgttttaagatgggagccggccagctctttatattgcgccttcaactccttcagttcagctttcaactccttgagatcagctttgagcagcttctccagttctttgtctctgctgactttcgccgaaagaatctgggattccagcgcggcaacgtcatcagccttatcctctacatcctgcgccgaaatcgggcaattggccagggcgatcctcgcggccttgacttcctcgcgaagacgcaaaaaccgctcggccttagccgggccgaagcctttggcgttcatgatgccgccgatcaggcgtccgtccgctaccacccagttgagttctgaatgctccgggtccagggccgtatattctacgccttctttggccaattcgcgaaggatagacacagtttgctggtcgtccttcgccgcccggaggcacgcggccgcgtattccaggcggtgataccgcttcatgtagcaggtccagtacgtcaccacggcatagcttaccgagtgggagcggttgaatccccaggctccgaacgtcaccatttcctgccaaactcggtgagcgtcttccggggcgacgcctatggtcttggcgccttcgatgaacagttctcggcgcttgttgaagaactcttcaccctttcgcgccgacatcgccttccggattgccgacgtttgttcccagtcgaactggccaatatccttcacaattgacatgatctgttcttggtacaggaacacgccatacgtaccagacagatactgctcgacctgcgggatggtataggtcacaggctcgcgaccggccacgcgctcgatgtatttagtggccattcccgaagacaacggacccggacgagcgagcgccgtaatgtggtcgatgttttcgaacgcggtgatgttgatagcattggcaactgagcggacggcctggccttcgaactggaagatgcctgacatcttgtcttcgttcagaacatccaaaaccgccttgtcgttcagcggcaagtcgtacaactcttgcgccgtcacacaattcgcatcttggatcacgcccagcgttcgaaggcctagcgcgtcaatcttgagaagattcaaatattccgaatcaggcttgtcgagctgcgcgacgccttcagaggtaaccgtacagaaatcgattacttcatcgttgcagaccaggatgcctgccgcgtggacgccagagtgggatgggtgaatttcgaggtcgcccatgcaggcggacgcaatctcatacttttcgcggaagtcgcggccgggttgagttttttcgaacgtgtcctccaatccttttccatatcgttcgtccgccgaagtatattcgatgatcgagtttttgatgttgtcggtatcatggaatggaatgccgaagcgcttcccgacgtgagcgataaccgacgcggccttcagcgtattgatgttaccgagcttcaccacgttccaagtgccgtatttctgctggagatattcgaacactagatagcgatgggtatcggcgaagtcgatatctatatcgggaagatcggaacgggaaatgtcgataaagcgctggaagagaaggcgatgcgggagcggatcaacctcggtaatacccagcaggtagcagaccaaagagccggccgaagagccgcgagccgggccgaccagcatgtgcttcttggcgaacgcaaccagatcggctaccaccaggaagtagctgtcgaagtctttcagctgaatttgcttgatttcttcctggaaccgatcttcgtaagcttgggtccattccttgatgtggccgcgactgagacggtaggcttggccctcgcgagccagggcgacgatatcaccatctaggtggatcattggcgcttttgccagttttacatcgaccagctgctcgaccaccgcatgcgtattggccacggcctcgtcgaactcttcgcgggtcatgatatggcgaagacgggtccacaactcttcctcagtcgcgatgtggcgaagtccgaccgattcccgaaccttccaggccgaagcaaaatctacatggccgatggacggcatgtcgttgtaggaggtaatcaccacaggcttgccgaacgccctggccgtctccatggcgccgtgcgcggcgaccatcgacgcaggattgatgtcaatgtagtcgattccggccaagtccaagtgggcataggcctcgccggcaaacttgatgatgccgtcagcatcctggaattctttgggcgacaagccttgattctggacagtcttcgaagtaaggcgatagaattttctggtatctttggctagcgcccaggccttcagcttcagctctttttcgccatcatcggcgcatttgatcgggatttccatgccgaatccgcgaggcaattctgctttggtagctgcctgctcccagcggacgtgaccccaggtcccatcatcgacgatggcaacaaaaggtgattcgatttctttggcgcgctcgatgatttccggaaacctgccatatgcggcgccgtatgagtagccggagcgaacgcggagttgagggaaagacattatgcggcctccattgcttgatacgcccgatatactcccatgcgcttgcatacttcgtggagcagccgcacgtcgtccaatgcccggtgcttctgaacataagggccgcagtagtgctcatacagatgctgcagccgcatgcggtggccgaacaatggcgccgactcttctacagtacagatatcgagcgatgggaagttgacttcttccagtccgagctttccgcgagccaaatcgcaggtaagcatgaatttatcgaatggaaggttgtgggcaatatttgcgtcggccttcgaaaagaaatcgcgaactttctggcgttgatcgaggaacgatgggtgtttgattaagtcttcattcttcaggcctgtgatctttgtaatgatttcttcgatcacaatcccagggttgcagatgaactctacttcatccaaaatcgtctcgccatcggtgatcactccggcgaattcaatgatcctcggttgctttctcagacttaccctttggtggaacgggagtcctgtggtctcagtatcccatacggcgaatctcatgtctgttccctcttatgtcgaaaggccggctgctttcgcgaccggcctgaagagtataccgcaacggcgcagggttatgccttctgtccgtctttcggcgtgatgcggccggagtgcatggtggcgtggacaaacgctgaatagttgatcaagtcaaataccgaatcgtcatcctcaaacccactattcgccaggcgagtgagtttgcccactgtatgcatcacgaacagggcgagccgatggtcatctgcggtcttcgccaccatgccattcgggaagaggatttccatgatcttgccatacatcagatcatttcgaccataagcgctctggcggtcgcggaaaatttctgcggctgaggacaggttgttgagaacatcctccacgaaatcatcgggatcggcatcaccgtcaccaggccaggcggattccatggcgaacggcgctgctgagtcttcggccgcctcttcggtcggctcttcggccggtgcttcgtagagcggagacggggactgcgcaaacgcctcgtcgagggtaggggcggagtaggaggctgcggcgatcgtctcgcctgccatgtcgttgggagcgctaccggggtcgctatcggttgcgacggcgaagaacggcgcgtcgcaaccttccaggtccaggatgtaggcgtcgatgcccaggcccttgtaggcgtcgatgatgtcctggcggtcatcgaatgccgcgacgatcctggtcaggccgtcgatcttcttcagaatatctagcgcgactgagcgcttgaactccggcgccggctgggtgtttccatactcccgcatgatgagctcatattcgcgatgttcggcgatacccaggtcgcgatggattttcgccctggtctgaaaatagttgttgtcggttcggccggtgatgaagaaaatcatcaggtcggagtcgatggcgttacggattcgtgcgactgcatgcggattgagcttgtccttgtcgagacgggaatggtactcgtcccattgcttttccagggcgaagcttttacggtggctatcgtcgaagacgcatccgtccagatcgaagatcatgatgccattcttgggttttcgtgccatattcagattccctcgctttctgctttctgggtgatggttttctcgatgaaagtgccatcggaagttagacggaacagttcaccgttctgaaccaaatcgaacgatttcacgttcatggtgacgcgaattgattcgctgccgttggtcacttcgacttgtgcgacatcaccaaccttctcgatgatgatcttcatgctacattgacttcccattgatcgctacaggattggcctcttgtttctccgatccccagaactcgcggcgcagctcttcctgctcggccgagcgatccatccatggacgatagaacttgcactgatagatcggtttcaccggcaactcaaccacaggaatctggccgggcttcgtctccagagcggacatgaagcggtcataggattgctcatggatctcatcttcattcagaaccttcgatccatagcgcgggaaggcacaggagccagtggcgacgcagtgcggctggagcagactatcgaacataggatagacttccagaaccagtcggcgcatttcgcggaaggcttcctgatactccccttgcgtacgaacacacaggcgaactttcgccatgtcgctgagagtccgcagattgaacttggccgcgatcttcgtttccatgttggaagggatgatcgcgcgggcatcctggagcgatgcgccggcatccaagagcttctggtaactggtctgcgcgtcggcgatggcatcgtgccacaggcggttcagctcttcgcgggcgtgataggtcgggtccggctcgccattggccgtagcctgctcatcgaaatcccagcggaatgcttccggctgaacaacggcgctaacctccagggcgcgactggtttcctgctggtaagccccggtccgcgtccgaacgagttgatgggtgaaattcttgctcacaccctcgatctggaaaatgaagtccacgaattcgaacggcgagcgaatggtgtccagcatgtacttccagtggtcgagcttttcggcttcggtcatggtcgccgggtcttggccgcgcatgcgagtggatttcgtccccaggagaagttcccaggcgttctgggtgtaacttatcagagaaattttcatcaggaatcttccggaattggcgtgaaagtgaatttctccaccagagccatagccagcgcttgtgcgtcttccttatgaagaccgtatctgtcgatttcttcggccagcaatctgcaagcctccagacggtcttcatactcttcggcgtggcacatggacgaaaagatagtgccgtcagaggtccggtacaccagttcaatggacattactgcgatcctcagtagcagcggatgatttcggcgcgaatatcgcgacggtccaggtaatgctcaataatcttgtcgcgggcgcgctcggcctcttcgcgactgccgaacgacaggttgaacgaagtgaaaggcttatcgtccaggcgcccatcgccgatcaggtacaggatgcctaccagcacgaaagacggcgctgtctgtcgcgtttgcggcgggtcgatttgcatttcgaggaaagacatgggaacctcttcaggatggtctggtgagtacattaatagcgctcctgctgagcggccactgtttcaggttcgtagatgagcatgtccacgatttccgggcactggcttttcacccagtcgattgccgccaccatcgtggtgtcggcgccgaaggtgaaagttcgataagactcatggatgtacggcgaacccatgaagtcgcgctcggtcgtgcgagaaatgactactttgatattaacaatccggcccatcttcggcctccactttagcgatgatatcggacaggctcagcttctcgccgttcagaaaataactggcgcgaaacttcctgtcgccttctggcccgacgattcgggctgttattgtgagactcccgccgccaagggcatccgtgtccctgaagaaagccagcagcgcccgcttgagcgctgcctcgcgaggatcgactgccattaacctaccacattccagccgtgctgggcgcaccataccgcgccagttcccgcaggaagactgttaagaaggaatacaggggtcaggcggccatcctcggtcatgtggatgaagtagcgtgcactttcaccgagccattcggccttggcgatggcgcgttcgaggttgatcttggtggcgtaggtcttggtggtgtttttgtcggtggagaaggttacttcgcgggccattttgtcgattccttttggttgaagggtttcgcgtttcgatgagggaatactactctcacctggctcagaagtaaagcactttgtgtaaattatttcacgaacatcttcttggccttctgataagacgaagaagtcatcaggcgctcgatgacgtccatgtccgaaaccagatcgtccagaaggacgtttcgccaggtcgcgaaccgaccgagcgagaagatgccggcttcatgggtgagattccagatcatggattcgcgctcgtcgcgaccgagcggaatgattttacccttggtctggacggtcggctcgccgtccggaatgagattcttcttcctgatgccgaaggccgagcaaacttcatccaggtcccagttgctgtcccattcgatggtttcgatttcaccatctacagtctccacgacgcccttagtaacggattcgacgataagggtgtcgccggtgatggacgctcgaaacgttcccacttcgggaccagggaaatacaccgtctggaagacatcgcaaggaatggaaagcttgtatcgactcacgacgatggaggttccttcgccgaatgacgggtcgatccccaggtccagccctgccgcagccagattggcgcggaatggcgccgtgctgatgatattaacgtgatcgtcttgccggcgaaggaactggaagaaagaggcgtcgaaaggcctgccccagctgatgcgattcgccagcttagcgaccagctgctcatagtagtcggccggcgcgatccagcgcttttcggtcgccatgttccagatggaccgatccgacaggccgcccgttactttcctggagtacatgttgcagtagtcgatgcgcggctgagaaacgaactcgccgtcaatgtagatggccttgtgtacggtgacttcgcggaatgggataccggtgagttggccgatgactggtgagcggaaccgcaagagcgcgttgtggcgttccttgctcgtcggcgtcgccgcgtcgatgatttgggcttgagggaaacgatgcgcggcgatcaggccggcgagtccggctcccacgatgataactttgtgatcaggaatcatgagatgttccttatgagtgtacagaacttgggaggataaaaaagggacccattttcatgagtcccttgaagagctagacgattcggtctcagaagagcggcggcttactcttcttcaccatcggaaccgtcggcaccctgaccttcaccgtcgtgctcctggccttcatcggccttctcgtcatcgccctggccagcttcgtcttccttcgaagcgatggcaaccagatcgacccagcccatgatttccagcttgctcagatagctgcgaaccgaggtgccgtacagcaggtgggccaccttctcgccgaaggattcgatttcgaccggctcaccaacggtgcagtgctcgttgatgtaagcaaacaccttgccgcgagtcgagaaggcctgcggggttccatggccgtcgccggtcgggatgaagtgggtggcacgcggacggcgcgaaccattggacttcaggtcttcgcggcgggcttcggccttcgcgcggcgctcttcctgctcttccttgcgacgcttcttctcggcctcgcgctctgccttcttctcttcggccaggcgcttgcgctcttcttcgcgggcggccttctgggcttcctgcgcggccttcttctcttcggccttcttggcgcgctcggcttccttctcggccttcttctgctcgcgctcggcttccttcgccttcgccttctcggcctgctcggcttccttcgccttggccttttcagcacgctcggcttccttggcggcggccttttccttcgccttctcggcgcgctcggcttccttcttctcgcgctcggccttgcgcttctcttcgcgctcggctttcttctgctcggcttccttggccttggcttcggccttctcggcgcgctcgcgctctttacgttggcgctcagcggccttctcggccttgcgcagggcagcggcttgttccttggtcagctcttcgccttgggtctgttcgttctggtccttctgttccatgttcttactccgggaatgtttaaagggatggcttattggcctgtgaggggattatctctaaactaattgaagaagggaataccttagcctgaactttcctaaatattttctttcgggaaaatccaaactctagggaacttatttatgttcgagaagttcctagcttttacgcaagaacagtaagtattcgattgcgcgagttatcccagtatacatcaactgactataagggatggacggcaagttttcttctaacatggcgacccgtttccattctgaaccctgcgacttgtggaacgtcatcgcccagccgaagtcgaatccgccaatagccttctgcgcctccagccgcacgtcttcttcgaccgaaaaactcagagggttgaacttcacccagcgctcatagttcgtgccgataatgcgaactttggcgaacaacatttcatcaggctcatcatcatcttcttgcccttcaggaactggcttgaagtccagcagaatggcttgttcgccgttcatgattccatattcgtgctggttcccagtgcacaccagcttctcgccgattcccggctgcgcacctttgtagccgaggattcggcgagcgcgtgcgttcaagcgacggcgagtattgttgtaagcgcaaagaatcacaccatcgttgtccaggaacgtccgcatttcatcatccgacatatcgaagccggcccggaccactatgtcatcatactcgcggcatggcaagcgcttgccctggcggacgaacatcgacgcccgaacgatattgccggcgttgcgctcgatttcggtcatgatggtatcacaactgttctcgtggaagatctggacgccgcgcacaggaggaacttggccaaagtcgccaatctccaggaccggaattcgatgcgacagaaggcgctcttcatcccactcgccgatcatggacgactcgtcgagcactaccaacttcggcttctcgtcgagcgagtctttgttggcgaacatgatttcgccgtcttcatcttcaccaatcggtcgatagataaagctgtgaagagtcctggcattgacgcagcctttctcacgaagacgcgcggcggcctttccggtcggcgcgatgaagacagtccagtccatcgagcagcaaagttcggcgatgatcttcgcaatagaagtcttaccagttcctgcaaaaccggcgagtcgatagacctgacggcggtgcgctcgatcacaccaaccgcgataccagttaacgacggaatttatcgcgtcgatctgctggctattgggtcggaaaccgaatcgctcttcgatctgatcgacggtgaagttagatgctgacatatttgcgttctccaacgctaggtttaattgaattgagactcagtttaagcagaccgtccacagaccacccagtatcacgacgatatttgcggccgtgcggatcgacatagaagtttttcgtgcgtcgcaacagaacatagtgccaagcagcaccgagcgcatgggctcttcctttataagggaaggccttcagctgctctgcggccttcttcgccccagggagccagcggacggtcgagaggaccaagaccgcacccttgacagcctgggaagcggcgcggccgtcctgtgggctatagcgatgtctatcggggtctacccagtggtggttgccgcgccggagcttcaccgtccgagaccggccctcaaacaccacagtaccttcgtgagtaaaaatatgttccgccatggaatgttccttataacgtacagttctgctttacctctgcgcaagaagagtatactatcagctgactcgtcaaagcgagttaatttaatccgactttacttcggcaggaaagtggccgatactagcgccgccgcctgtactgccctccaaaacagaggatacattaaatgcaagagtgcaagatttcccgcgaccaactcccggtcggcaatccgaatcccaatgtcgataagacccgcgacccgaacctaaagcccggctacctgcgtcgcagtcgcgagctggaccaggctcttgccgttcgcattcgtcgcgagctgatccatgctgaagcctccgacttggccatggccgggtgggtcaactcccagtccagcctctatggatcgaaagcgttcccgcgccattccgtcgttcgcgtgactgggatggcagaatctgaaactaacgtcggaatgctcatcggcttcatcgagcaccgcaagcacggcgaatgggcagttctggaaactgggacgaaagaaggcggcgcgatcaccatcccagtcgagagcatcatgcgtgcgtcgttcgcagaggccgaagaattcgccgagaaatggcagcgtaacctggggtggcgcctcctgcgtcaacttcgtgaatgcggcgccctggccgggactgaagacgaattcctgcggcggataatcaatcgatatgttcgggatcgcacgatcctcgaccaccacaaggtcggcgcagacaacatctacaccgacgcggtgctcaaaagtatcggcgaagcatggccgcagattcctgagggaacgttcgtcggccaccgggttgctcaacttctgatcaattataaattaggtcgagcggggaccattttgaatgaccttgtggacttcctggagaggttcgcggccggtcgcgacaaagttctcaacatcgccatttgtaattgaggtgattggcatgaacaataaaccgacgctgaatcaccaccatcaaactgcattgttgtatctgtacaacaatcccaaccaaccgccattcaccggtcccaataataaggcgctaaatgaacttcgacagatggggtatgtaaaggcgcaagagttcgaaaactgggcaggaaccggccgtatcagggctgaatggatgctcaccaaggcgggaatcgatttcgtggaaaatgagattcttcggaagtgcgccgcctgcactggcatcggtcaaactttgcttcgtggaaaatgcaccatttgtaatggtagcggccaggtgtggatcagcgacgagcctcagcgacactttgaggattgccctcaatgcgctcccaagttcgaaaagactgatgcgaatcggctcgccgagcaactagaaaccatcgctcgtctggaaaaggaacttgaagaatcggaaaagcgcgggagcgaactggccgcgagctattgcgacggcgtggtcggcgatgaatacggacacacttactgccgctacagggtggagcgtgacgccgtcctggcgcgaccatccacggctatcgctacagctccaacctatcaattccagtctcgggagattggtgaatccgattggactccatgcgatttcagccggtatctgtactgctcgaagagtcccgaaatggatacgcgcgtcgtcgaggtgacttcgcaaacctcaccttcccaggccgagcaggtagaggcggagcggccggcagtggtcgggtatcgcagcgttgagtcgggcatggtctacgaacaagactatggcttgaaagaccccgaagctctaacaacggtcgccgagtgtgacagcatcgtcggggaactgcgggcggagcgcgacgccgccttggccagggtcgctgagctggaaggaaagttgactgattgggtacacgaaggattccggctcaacgaagcgctggcgatggcacgcgacgccgcgtccaagggtgatgccgcccgccacgctgctggtggcatggaaatggagattcatgagctgaagacgaagctggccgagttggagaagcaagagccggtggcatggggagcattccatttcggcgggaagcttgacggcaagctgtatgcacaatgcgaaactgaggcgcagatagaggcgtatatcctcgacatacaccgaagcagcgactcattgacgctcaggaaaggcgccctctacggcgccccggtcgctcaagcccaacgcagcatgccagaggattatgccctgatcccggttcgcgagacggaagcgatgcatgatgctgtaatggcgctgctgtacaatggcgtagcccgcactgatacgcagaagttgctggatgcgtacatcaacgctgcgactaacaaggagtccgtgtaatggaaccgaagaaaccttcaccagtagatggagtcatcatgaccagcctcgacgttctcaggaaggcgaagcccgaagcgcaggacgagtgcgccgtgtccatgttcgcaacggcgatccgccagaaactgcagcgctcccgcgataaaggccgaggcggctggatcgactgcgacgaagatgttctgatcaacggattcgccgaacatgcgctgaaaggcaatgagaacaacctcctggacctggcgacgttcctgatgttcatgtgggtgcgcggcatcgatgacgcgaagattcccccggctctagaaaaggcgcgacagcacaagatcatggaagcctggagtcgaatccatgaagacggcctaaactccgccagaaaggcgagtgctgcgcgacaattcgtggaagtgcctcgacgcaaggggcgcccggagcgacttgcatgaagcctcacgaaataagactggctcaggccgaagaattcctgagagaactcggcagagggattccggacgacgaacgggtgatggtcggctacgctgaagaggccacagtccagaccgacgaaaacggccgcaagctcaacgcaggctggtggcccgtgccctggaaggaaggcaagtacatcaattccaggtcaaacgcctacgcctgtatctcgtcttccatcaagacgcccaacccgaagaccggccagatgcgatactggcgcggcgaggcctctttcggccacggcctggcgttaatggtcgatgacatcggctccggcaaaggttccaaaggcgacttcgaccgcgacgagttccgcgaacgcctggagccgaccgcgattgtggagacttcgccgaacaactaccagttctggtatttcttcaaagagccgatgtcccacatgcttcagtttaaggcattgctctattcgttcgtggaccaggtgctaaagaaaggcggtgacaacaccgtcaaagatgtcagccgttatggtcgcatgccattcggcttcaacaacaagcgcgggaaagacggcagcttcaagtatgccgacgaaaacggcaagcccgaactcgtgcgtctgtatcacgcagactattccaagcgctactcgccagaggaaatcgcccaggccttcggcgtccgcatcattatgccacagatgaagaaggtggagataaatcgcgacgattgggtttatgaccaagtgtggctgaagtatgccgagcatatctgtacgaagtacaagatgggcgaggcagcgggcggccaggtccaacagaatatgtccggcaaatatcgcatccgctgtccatggggagacgagcatacaaatggcgatccattcggcgcctactttcgcgggccgatccctggcgctgagcacgaatatgtgttcggctgcggccacgatacttgccgcaaagagcatcgacggacgtgggctgccttcacggatgaagtagtgctgccatatatagtcgaacaattggaaagaatcaaccgccgtcatatcggtgaggagtagacaatatgcaaaacgatcctggagtcctgattaccgccatcggcttgctgttcctcggccttatcatcttcttcgaaggcctaaaggggtggaaaatacaagtcgcaaacttcctcgcgtcgcttctgtgcttcttcttcggtctttccgctttgacgttctggttcgtcgttgcgtttgacgtattttaatcgacgaacggtacagaaattttcggatggggacggaacttattagctatgccggtttaggtaggagataatagccgtccctttcgcctcaatatgtagaggcaatgttgaatccgatcatgtaaagcagaaggcggcaaacctaacatgattatcgacgaagataatatttttgatgatggcgaatcagggtccagtgagtttgatctcacgcagatagaagatgctggaatggaccctttgatgaccgccgcgagcaaggcggccgatgatgcgattgcgaggaacgaaacgcatcgcgcgcaaaaggcggcaagatacgccgaggcgtatgcggaaccagacttgagaaagcgagcgcgattgttgatgctcgaccaggcgttcgatcttccggtcagccgggtggtgaaagggccgttcgatgacttcatcacgaaatacagttcgacttccgacagcaattatctcgcggtatacgatactttgttctgcaagggtgatggaaccgtcccgcatccacacttcgatgagtttcgcggccggctggtggaccatcgtggcgtggcgttcaacaacaagaccctcgacccgattgacctgatgggcgccctcgcggctgcggccttggacgatccctcgatcaagaagacgattgagacttgctgcgtttgggcgcgtcgatatcgccgcaactcgctgatcgagacgtttgagaagaagattccggagtgggacggcgaagagcgaattggcacgctgcttatcgatctttttaagccattcgacaccgaattgaaccggatggtgagcaagtatttctggctgagcctgtactgccgcatcaactatcctggaatctcggcgcctatctcgctggcgttgattggtgggcaggatgcgggaaaatcctatttcggcctgctgatctgcaaagaactgtcgggcggtcgcgatctggctcccgtccagctcgatctgagccgacacgaccagacgccattcctgcgcaatatcaccggcaactcggtcattgcgaacgtcggggaaatgtccggcttcaaaaagggcgacatggagcgcatcaaggagttcttggtgcggtcttctgatacgtttgaccagaagtttgagccgggcgaaacgatcaagcgacaatggatcaccatcatggacggcaacggctacgatggactccaacgggacgactctggtaaccgacgtttctatcccatgttcgttgcgcagctgcccgatgaggatggaaagccgaactgggttaagccgggcgatggcaatgaaccgttcaaggtggacttcaccgacttcggccgcaaattctggcaagcgatggctgaatgccgcgcatggatcgaagagcacggcgtcgatggctacctgaacatggtgtcggaagcaaaccgcgaagtccagaacttttctatttcggaaatggagaatgcgcgtggcgtggttcgcgacgatacgattgatatgtatctgatcaacgtactgatcagttgcgagtttgaagaggttaagcctggcaagaattccaagactcctgggtggcgcgtcaacacggtggaaatcttgaagtggttcgatattctcgccaggaagaagccgatttctcgccatttaactccgcacctgaaagcgcttgggttcattccgaataagaacggcctgaatggatggctcctgcctgccgataaagttgccggtcaggaaatgattgggtccttgccgtcattcaacgatgcgctgatatatatggtcaggaagaatgacgccgctgtctctgatgatgatgcaatgtcgcatatccgcagagtcaaggcagagcgagccaagatattgggcgaggatttctagtgtactgatgcagctggagtgaattaggccgccttcgggcggtcttttctttggtgcagagaacattaatttagtcggtgaacaggtgaggtctgaaagctatgtgggaattagggtgttgtggcggcggtgtattgtggggaattgatagattttcggtatcggtctgctgcgtatgattgttggattttgcgtgaaatgttgagaaattgtgggtttgaggcgggtttttgtgtggaaatagccgcaaattcctggattgctattctgactgggaagatgggaggcctactgccgcgtgggtttgcggccaaattccctaattcccggttttccgagcatgggttaaaactattctacagcgaaaatcgattgcacaatcctaatagaaaaaatctatcacggacgttacctatctttaaaattaataaattaatgggaatttgggaatttggaatagtttagtctttgaaagcctcgcggcgctaagcttgtacattacccggcaagtttccgattccgctcaactcgcggcagggtcgccggaaacttccgtccttccaaaccatgggcagcggcaacaccacggcggactaagcggcagggaccaaaactcgacgagcggaaccaggaattaagccacaaggcagaatcgctcacctggacacattcctaacatccgatttaacatttttatccaaacgctcatccgccaccagccaatccgatcctcacccaccagcatacctcccatataacatcctataacaccacctaacactcattcaccatccaacccacccatacctaccgaccacccacaagcagcccatagacgtgctccctggccccatagtacaatcgcgccatactcagtgtcgcggcaaagcactaggtcccatcaacagccaggcaaccgcgacggtccaagaatcgaactccagggacgcagcaacaaatgaccgccaaatcctacagacccgacgatttagtcacgccacaagaattcgctgatccgcagttcgcggcgatcaaccagaagcgtttcgatctgtacatcgacctgcgcgttcaaggctacagctcctggcgggtcttccgggcgatctggggcgaagagcacatggacgggccggcccaggctcgcatcttcgcgatggagtccaacccgtactatcgcaagcagttcaaagccaaactgaatgcgaccagaacgtccgatctgtggaatccaaagacggcgcttcacgaacttctccagatggttcgcgatcccactgtcaaggactccagccgtctatcggccatcaaagagctgaacgttctggccgaaatcacgttcgttgacgagtctggcaaaaccagggtcggtcgcggattggcagacttctacgcatcagaagccgaggctcagaccgccaccgtcgctgccgcggccgaagccaatggctatgtgcaggacggcgaagagggcgatttcccgtccccgacgccggagccgaccgaggaagaccgcgccaaccccattcagacataaaataacatcgttctaggcccgaatcggaccgaactaaggcgacggtagcgggttgggacgaaaaacgattctagggctgttctaggaagccgaccaataacaatcagaaacgacaaagccccggactctagttcagaatccggggctttctttttgggcttcttattctccagcttcgatgatttcgaagttgtatttgacgccttcgtgctcgaaagtcaatttgccggcctccttcagctgcatgcggaagcggatgtgcttcgaagagggcaggccgaactcgatgaatgctgcgttggtggaccggaactcaccgcgcttccctttgacggtcaccgccacgccatgacgctgggtgcgctttttggagacttccgggtctttccaggagttggcgatggctgcggacaggtctttggcctctttgaccttctccggtgcgttttttgcttcttcgcgcatcttccggatttcttccagcgcttcctcttcggtgatttcttcttcaggcttcagattctcttcttcggccttctcttcttccttcttcttggaagtgcgggttttgtaaaccttggccggggcttcctcttcctggaaggcttcttcctcggccggcagagcattcaggatggcgaggcagcgacgctcggcggtcttgcgatcagagaagcgcttgacagtcgcatcggcgttgtgagcgttgtagaaggcgaccagttctttcatttctgcgttctggatgtcgccgaaggttttgatggagttggtcatttttgcgatcctctgttttggaagatttcgttcgggcttcagtttgtcgccccgttgaaagagattatgcctaggtcgatgctgcgtgtctacatttatttcagcataatgatgacgaacccgacgaacggttgtcagatgcgaaaacaccgcaggataggctgcggtgttttctggacgatgctgcgacggtcagaaggtcgggatcggctcgacaggcaggtcgccgggcttatcgttgtccgacgcgggcgacggactggacgggatggccccggaccgaagccccagcggttcaggccgcctgcttacctgcggtgccggaggcgcgggcggagcttttggtgctttcggcactggaggcgcgggcggagctggtggagacatcggcccttctgggaggtcgggaaggctcggttctttcggctcgtagtgaactgtcgtgtcgttgcccggttctgcgggatcgacgccaacgattggcctggtgacgcagcgcatgttctgatggttcgccagcgttttcagggcgatggaatctgcccatacatacgggttcttgtgattaccagggccgtggctgatgatctcggcaggcctgtggccgttgaggttcagccactccgccatcccttgccgagacagcgggcttaccacgatctggccagtggcctcttcggcaacggcgaacaaatcgccgagtttgaatccgatgatcaaatagttggacctggcctcgccgacgaaggcgacagtttcagtgccatgatggatatcttgatcttcccagatgtatagcatggtgcgccctcagtaaggttgcttggtgtgctcgaccagagacattccggcaggaactttgaagcgtatgtactcgatcatcatcgcagttcggcgacgattcgttccggactcgtcattcacgaagagttcgcactggtgcggaatgactcgcgtcaccaatgcttcgcctttcgagccgtagaacttgatgtaggctgcgacgcctcgcgtcatgttcagatggatcgtttcgcagagtcgctgcgcggccgacgcgctggaaagatctgtcgggctgaccgtcacccagtaatgggcattcgccgtttgctctttgtcagacatcaatggtctccatggtgaagcctccaccgaatggcagaggctagttgttagtcgcgcttcatcaggacgactttggttgatgagacgtatttaccgatccaatcttcccagtagtcgccgaccggacaagtcaactccagagttacttcaccatgccagagttcgaccgacaggatgatggccctgtttcttgctgctgagtcgggtctgagtttaatcagaatctcgtcgcctgttttaagctcgtccacccttactactttttgccatgtcgttctcctatgcgattgagttccagatgatggttgggtagtcacttctgagtttaatcccgaaatccttccactcaccgccgacaagtgctgacaatccgacacttactttgttgtgcggagcaggactggcgcgcaggactatggctcgacgccgaatggggtcactgtcgtccacatgggtgagtatttcatcgccgaccgtcaatgcgcaagccaacaaaatatttgccatcacaacctcccgtgggaaggcgcggccaggacaatcccgaccgcgccgatggattaacgtttatgaaggatggatacagagtccacgtcgatgattttgatggtacggcgacggcgtttgttgctgcgttcgtgaatgcggatcaggtcagcggatggagcttcgtccaccacccatacgtcctccggtttctgcgtccggagcaggaccgtgacttcagtattctgggcgaggccgttgcagatgaacgtgaacttggacgagggagttctgtacattcctagattcctttttggactttgggtccgacttctcagccggtgaagagattatgccctgattctcaccgccgagtaaagcatttgtgtatcaattctcccgtcaggtggaaccaaagcgaggtatcgcttatggctacgctaccgcgccatggcccttctcgctcgcacactgcgaaccacaagctgatttccatccttgccaggactcggccgaaagactcgaacctgcgccgactggccagaatgtcgacattgactcgtcgattgacttcgtaccggcgaccattgatgacgaagaccagacgcagagtttgtccgtcaagacactcccagtatctggtctcatatcggagccaatagcgcttgcctgccggccccaccatcgtcatccttctatactcctggcagcgccacggggaccggtcggtggagtcggatcgaatcgacccaggatgtagtcgggccgacgcgcttcctgcggacatacggcgagaaggcgccatcctgcgtccagggcatgctggagttcgtccgtgcagcagtcttccttgagcagcagacgattgacgttctggaggtttggaccagggatggccgaactggtgagcgaattccaaccctcgattccgctcacaatctccggttggttgatgtagcttacggacataccggccaaccggctcgcggccagttccagacgctccagcatgggtcgcagagcggcttccgggtcaacgtcgtcccagagcagaaccagattggtgattgagtacggatagttgctatccaaatcccaggccgaagccgtcaggcggcctaagccgatttcgctgcacaccaccgggacgttattactccaactggacggctcccagtcacgctcgccgggagttccgatggttacgccttccatgttccccaggagaacatggaatttgctgatgtattccgcctccagcgccttccgctcttcgtcggtctggttgtggcgatagaaggtcggaggactgactgtggcctggtagagtttcatgattgttcctttatgtagggttcaacttcaaagaatttcgtcgcagaacttctcgaaaggactctgccttttcttctcgcagacggcacaggtgatttccagggcaggaatctcgttataggtcttgccgaagtacagccagcgtttacataggcttcgaccgtccgccatgaagaagtgaacttttcgagcagcgccgggttgtgcccagccgctcggcagcttactggacttgttcatggtgaccctcttgtttaggttctggaagccatttgttcatttcagacacccatgctccatcgatgtatgccagatagaacatggcatcccgaccgaagctaaatccaacatagaatgagcctgggtctatttccattccggcatgcccgtgatcttcgatgtagaaatcgaacattgcatagctcataccatcaccatgtcgatttcgttgatgaagaagtgcacgtcgacaccatctgcgcggccggtgtaacgcagacgagtcgcgccgtcgattttgacttcttctacgccaatgacttccaagatggtgtcattgcagtacagcttgacgaacatcttgatgccggagcctaccgccgcgaaggcgatctgcttatacaggtcttgcttgatcatgctttgcgctcccgtttgctggtgtatatagcttcgacttcggcctcaagcttcgcccaaagttcgttgtccaccggaccccatggtccggtctgggtgccgtcaaccggcgcgaacttcccaccggcgcgacgatatttggaaagggtctggagttcgatgattcgccgttcgtaggcgtcgaattgagatgtcatttcgcaatcctcttttggacgttcgcgtttcgatgaggtgactatatctaagtcgcctcatcgagtaaagcacttctgcgaaattatttgatattctgtaaggtcaggaggccggacgatttggtcagtcgattgagccgagtctccacccgttgcgggcgaaggccgagcgacccgacagcttgcggcactgaatggagcttccatcgtcgaaagtataggctgtggcccagtccaggcgctcacgacgtactgccgcattggcgatgtcttccagacgggctttaaggagttgctcggctttagtcatctcacacctctttggtttattcactcgatgaggtgactatacctcagccacctcatcgagtaaagcacttttgagagaattatctgaaatttctggaagccaggaattgtcgccagagccagtcaatgtgatcgttcagatagcgctcgccatcggatgacagtgacaggcagccgtcattgatgccgagtttggaactggcgatccgttcgaattcgaactggagcgttccgggccgagggatatggtacatgcaatatttctgcacgatcagcagtcctcgaaaggtttacggctcgcaatttccgcgatcctttgcatgccgatgcgatagaattcggcatcttcgcgcgcccgcgacaatgcttcgcgcgcttcgcaagccaacttgtattgattgttggcattggcgatgcttccgtccaggcttctgtcagactcttcccggagcgccttttgggactccagctcggtctccagctcgcggattcgaagggcgagctggctattcgtttcggcagctttgttttccagatcgatggccgatttcgctgctgtttcgagcctgtctttgtcggccatgagggtttccaggctcttgtcgagtgcttccagaagagtcttcttggactccagctccagcgaaaattcgacgttctgcgcggacaagttctgcgagtgcttcagcagttcgtcgattcttctttgatgccccttgatggccgagttctttgattcaacttcggcctccaaatctctgattctgagttgaagctggcgattcacctcggccgtcttgtcttcgcgagcgatggagttttgcaggcattcgtccagacgcgagttctccctatcaagctccatggccgtcaggctttcatcagaagtcacgccttcggattcgtctttccgtccctgatcggcccgaagataatactgtccagcggcgaacgccaggagggcgcgattggaaaactcagtagcgccctgcaagtaagaagatttgtatcgaggaacgaactcggccttctcttcgtcccagcagaggctatctgctgtcggccagaactttcgaaactgggaggcgctgacgcttacatccaccaggacgatttctgcttcatctacgacttcgagcttgaacttgacgtcaccgtcgatgctgttgaaagggattagcttggacacgacaattctcctgtgaatggcgcgaccaacctgccgcgcctgatgattactcttcgccttagtccgcgctcagccactcttcgaaggcgaaattgaccttagactcgacccaatcttgaagctcatcggcgaactcgtcactgtcgatgtccatcggaatgcccagagtctcttcgttccacagttcggcattcagttcgaactggatagccggttcgccatccacattcagcaggatgcggtctgcaacttcatagtcgtcgacatcgaagaggaaaccgccgccgattatgtgctggatgaaagcttcgtcgaagttgctgacgccgatattgatctgcttagtcattttctgacccttatttggcgagtttgtactgagctttgaggttggtcagcttagctttcagggcgatcatagcctggccgcgcaggccttccatttctgcctcgctgatggcgatcttggcggagcggatttgatcgttgatctgggatttggtcatttctgcgttcctctgttttggagtgtttcgcgtttcgatgaagagattatgacgctattcagaatggaagtaaagcagaattgtgaaatatttctcaaagttgacgagcggtctgttcgtcaggaatatttcctaccatggaaggcgtgtccgcatccgaagactgataggtatccgttgacttcggattgtctcttttcggagtcgatttcgatccttagcatttccagctcataccgggccagaccgccccactccctttcgatgcgttcatactcggcttctaatcggcgcagacgttcactcatgggaatctcctttggatagctatcactagcatcagtgcgtacaagtcattcgttcgtttcgatgaagagattatgcagttggtcagaatggaagtaaagtgtctagttgagaaaattcatgtacgccgacgaacggttgtgctcgactgtctgctgcggtgtcgatatactcggcctattgcgaataatggactaattaaa

SEQ ID NO: 24 - DNA, 64021 bp, Hollowayvirus EPa26
  source 1..64021: mol_type = genomic DNA; note = EPa33
caggcgatcaagcgccttgggttcgacgggctgctgactggtcatgggttgcgagggactttctccactgcgctgcatgaaatgggctacgacacgacgttgatcgagggccagctctcccatgccgatcccaacaagacgcgggcggcatacaaccatgccgcgcacgtggagcgtcgaagggcgatgatgcaggactgggctgactacctggaccggttagagcaatccgccgcggagtgatcactccgcggcctcttcttcgtttgccggtgccggcggagtccaggtgccattgcagtactggtcgatttcagcctctgcccagcgggtggcgcggccgaacttgcgccctttcgggaagtcccctttcttcatatggtcgtagatgaacgtggtgcccattcccgttctcatcttgaccatgttcaagtcgatgaaacgggggatgtcttggtgctgttgcgtattgcgcatagaaatacctccctggtccgtctatatggaccgggtgaaagttggggggggggcggcgaggtgcagatagtcgggcgaggcctctaccttgcgggtacgtggtttagaatttgcggcggactcggtcgaatggactacctgcatcgggcaaatgggggtagctcattcggtcgggttcttctgttaggattgcgcggctcaccggtgacgggaccagccttggcgggcatgtgcccctgatccggtgggctttcgctgggcgaaggtctggccgggaacgccgttcccggcaggatgcccagggcgtcggtggcgcgttggacgatgttgagcgccacttgcagcgccgccgcgtcgtcttgcatgcgcatgagcgcggtcatcttgggccggtgctcggcacacactctgtcgcgaagctgaccggcggcgcggcgaaccgcgtcggccgtgccgtggtgctggagcactagggccatgaccagtaccacgtcgacgctgtgcatctgcatcgttgtggtccgcaggagccagcggggaagggcgatgcctggtttctgcttcatccgaagcaccccgtctgccaggccgccagcgtgcggatgatcgggaatatctccaccagccctaccacggccaggccgagggcagcgatgatgccgagggcggtcaacgctctacgcatcgcttggccctccctgactcgccgctgcccggtcaaggcgctcgatctcagccagcgccagggcacaggccttgaccatatcgcgtcgagcagtgctcggcttccaccactgttcatcccagggccatgccagcgacaccagcagggcagcggttccatcgttcggagcgctggagccggccagggcgtagcaggcggcggcgcgggccatctggccgtggctgtgcgcatcgtcgtgctccggcgtccagccctctgcctcgatctgccgccggcgctctgcctgaacgtcgagccatgcttgcggcaccgatttgccgggcgcggcggcgagcagctcggctgcatggaacagagcgtcactggtgcgaaaatcggaataggccatgatcgcttcccagtggctttccgcttcttcgtcatcgaactcggacagcaactgaacgatggcaaaggtctgggcgtgttccggggcgccggagtcaagcatgccggcagcgttgagcgagtatttctttccttcggcccgtaccagagcggcagcatttcccggcacgctgtgctgagcctgggcgtccacgtcatcgtccagtgcaagcagtcggtctcgctcgtcgttgggcatgttggtcgcaagcgctgtgatctctacagctgttgaccatggggccggctttccatgtttcgtcacccatgtttcgatcagtttggcggcgagtatttctccgggcgtttcctcgggttgagcctgggcgaccggagctgcgtagagcttcgtgcccggatgcatgtcttgcagttcgcgatggaaatcaaggctgttccagtcttcacccggcaccttagcaacggtcgccaccggctcctgcttctcaagctcagcgaccctggccagggcggctcgcaggtctgcaatctctgccgccatgtgctcaaccagtagtgcgtccggccagaagccaggatcgctgttgggatgcgccgccagaattcgttcacgccagccaatcacgcgctcatccccgcctgcctgctctaccggtgccggcgggtcacgaagcggcgtgccggccaggcccttggcggccaggtagttggtggcgcgcgccaccaggttgctttccggggcatgccgcttcagggaactggccagcatgcgcaccagcattgccaggtcctgggtgcgttgtccctcggcgcggccgatgtcgtagaacggacgaagccagtgatccgccgccggcggctggctggcctgggcgccgaaggctagcgcgccggtgatggcgtctgcgatgacctgacgctggtcgatcgccgactgggcaggcatgtcattgccgtgcgcattgcaaatcgccgccatgttgcgtagagactccagcaactcttccttgtcagggtttattccggtgtcatggccgatagcctcccaggcctcgagcacagtgaccacttcggacctgaagccggcgtaccagagcttcacggcatcttccttggcgagcgggtagctgaggcctgcggcgatcaactggtcttcggacggcggcgcctggtccttgatcatggccagcaggctctcggccgaggaatgaacgtcgtcgaggtccgtcgaccagcgctgcgggctggtgtcgtggatgttgtccagggcttcgacgatgccgcgcaggcgggtagcgcactgctcgatcagttggtgttgggtagaggacatggtggtgtctccggttgctccggcgccgtagtccagcggctgaccgataggtataggggcatccttgcgccgtagtggcgcaatggcatggagtggggtaggctcgattttttgctcagggatgaatcgatgaagcaggcgcagcgacaactagtggtaaagacgcttaaggtgattggcctgatcggaattgcagtcttccttgcagtttctgtccttgcgctctttcaggtcgtgactaccgaatacaccctaaagagcttcatcagggaactgttcagcgaggaagtcttgattctggtgttctggttaccgctcgttgcagggggctgctgtctgtggctatccgcatttgtcagcgcgggcgcagatcactagaggtatccagatacgccccgtgacatggcgttaccctcggcgcccaaggcaggagcgcctgattttcacgcacgtacagagggtggcgcgggtggccatccttcgtcgtgccaagacaccagaggcgcccgccggcggcggtcaggatgctggttacggcttctactcgctcgggcttcgcattggcgccccaggcgcacacgatgtcggtgtactctcgggcgatcgcgcgcaggtgccagtcgttgtctgggcctattgggtcgtcgtgcttccagaggtcggcagggttcgtcgcgcgtaaggcgtacagattgacgacggcgatcccgttgcagccccaggccgaggcgaagttgcggcagcgccggatcgctggatcgtcgagcgcggcatcggcggtgctcggattgagcattaggaaaaccgctgtgcccttgtcggccaggcagtcgccagggcgagtcagaaggtaacggtactggccgcattcgctgatgatggcgctcatggcgtcacccgcttgaactcgacgacccagacccaggggttggcgtcccaggcgccggcgccgttgacgtcatcccaaaggcgcatgaacgcgcgccgccgcccgtcttcagtgacccagtgcgaaccagggggagcagggaaggccaggccaggaggtccctcagcaatagcctgctcttcgctaatgtcctgcaagcgctcgacgcgcacggaggtgatctccagcaggatgcgagaggcccaacgcggcatatggatgctcggccgccagcgcgcctgatcaagttcggcgtaccagcaggcgaatggatatggcttgacgcgcgggtcgtcgtagttgaaggctccgcgatcatccagaaagcccggctcctccataagatcgcggatatcctcgtccgcccgatatgccagcgccggtgcgccgcacatgttcacgtcagtccacgtctcgcgcacccacaaccgatcgccgggctggccgtaggggcatgctcggtcgacaacatgctgaggctcgtgctccagcaccaaggcgcccggggcgtagatgtttcctagatcaggatgcttgacgggctttgcgatgcgccgggtgaccgtcttccggccttccaggatggctcgaaccatcggcccgctgaataggatcggacgttctttcatggctgcacctgctgctgtgagcggttccagggatgccggcgcccgggcttgggctgctggcgcggggagagaagtgcgtcgcgcaggctcatgccggcggcgacgcggcggcggacggtcgttgcgtggaccgggctctggaagtgctccaccaactcggcgatggtcccggtcacgccttcgacggtgaagcgtctgctctcgctccagcgttcgtgtgcgcgctccagtgctgcggcctgcgccggtgtgcagcgtccgcgcttctgctcgttcgcacgctggtggtcggctgagcatccgcgtgccggccaggtgatctccggcatcagggtcagcagctcccggaacacccaggggccgatgcccagggccagccgggtggcgcggcgggaaagcccgcgcgcggcggactcccgaatgaactgctcagtgttcatgccgccacctgctgcggactcgggcgtagccgccgcttccatgggtcgttcgcccgggcgtacgcggccatcgtgttcgggctcacgctgttgccgcacatgtggacctgctgagacagagtgaaccgctgcccgttgtggccccgctcgatgatgtagctgtcggggaagccctgggcgcggtacaactcacgcggtttgagcatgcgcaggcggatgtcgacgatcacgtaggggctgccgctgatccacacggtgaccagggccagccggtccttggtggtcacggtgctgaccggctcgtccagcggacggatgttctcgcccatgccgtggtacttcattaggaacgccgccacccacacggcgccgtccaactgctcgggtgtgaggctgccggcgatcatttccggcgtgaccaacatgtggtgaccgccggttgccacggtaggcgccggctggtccgccggcgtgctgctgtggccggtggtattcgtcaccagcagggcgctgaccaggccgtggtgctgcccacctgcgctgactgtgtgcagcggttcgtcggcggcgcgcgcgtcgcagttaccgcgcaggtgcagcaagtgagcggtgaccaactgctgctggctgccgctgttcgtgaccgtgctcatcggcgcgtcggccggccggctgaaggtcgtgttgtagccgccgttcatctgggcgaggaaggcggtggcgatggcgcggtggttctcggtgacaacggttcccagtggctggtcaaccgacgcaggcttgccgctgtagctcgggccgccggcgccgaccaggacagcgctggccaggcccaaggcgtgcgccgcgccggccgggcgcttgcactcgccgccgctggtgatcgttggcatcggctggtcgaccggtgcgccggtggcgtcgaagcggaacttgaccaggtgggcggctgctacggcgtgcttgatcccgccggcgaccacggtgccgagcggttcatccagttcaaggacgcgcggtgcctgcccgtcgcgctcgccgtagccgacttggatcagcgtcggcgttgcaacggagaacgcgccgcccttcggccaggccgtgacggtgttcagcggctggtcaacggggtggaccgcttcgcgcgaccagttcgcaatgggaacgatgaaaggttgggcgcgctgaagcacctccttctcgatgccctttgcgatccgacgcatcgtcgcctcggccagcgggcgcttccggttgcggatggactggcccaggtcgctccagtcgatgcactcggcggccgtgcggtacggtttcagccccttgccgggcttcgcggcatgggtcttctccgccgccacaggctcgaaaccaccgtcggtggccaccaggtacaggcgctggcgggtggtcgggtcgccgtagtcgcagttgcgctcgacccaatagtcgacgtggtagccgaagccttccagggcgcgcaggaactgacgccaggtgcggcccttgcgcttcggatcgggcaccaggaactgctcgtgccgcggtacccgctcccctggctcggccactgtgccgtcgagacgcacgacgcggccggtcgacttgtcgcgcttcgcgatcagcgggccccattgcaggatctgtttcacgttctcgaggctgatcacccagggcccgcggccgagcttctgcagcttgccggcccacttcacaacaacccaggacaggtcgcggatctctttcttgcgaggctggccgccggcggcttggctgtggtgccgacagtccggtgaggcgtgcagccagcccacggtggcgcccttcgtgctcgcgatggggtcgataccccagacatcggtcggcagatgctcggcgtgcgggtggttggcctcgtgcatgctgatcgccgccgggttgtggttgatggccaggtcgaccttgcggcccaggcccatttccagaccggtgctggcaccgccaccgccggcgaacaggtcgacgatgatcgcgtcgtcggtgtcgtctagggccaggccgtactgggttttgaagtcgagcggggagggcttcttgagggaagtcatgcggcgggttccttcaaagcgagagttcggcctggccgctgtgcgtccagaccggtgctgagttgtgggtttcgatgcgatcggcaatcactgcggcgcgttggccagcagtcggcgggggataaatgccgaacctgctgacactgccgccgttgactgcagcattcgtgctgtccgcgctcgcgaacggcaggcggccgaaaatcttcgggtcgagcatccgcaggccgtggagcctgcaggtcggccgcccgcgggcatcgcagatggagttcatggctgcgctgatgcgcttccaccagggcgccgtgccgggcgtagcccattggccggaactgccgagggcaaccgtccgccaggcgctggccagtcgctgcaggcgctccagggattcgtgcagatgccagaccgggacgcccggcaaatgctcaggccactgctcgagcagccggtcgttgtcggcttcgtctccgtcaatcacgtcaggaatcagcgcccagtcgaagcctgggtgtcgacgccagtcgtcgacccaccggagatagctctcgacgtcgagcgttccgccctttttccagaccgagaacgcgccgttgtcgaagcagaagctctggcagacctcggcaacgatggcgacgtcgtcttggcgcggaaacgggaccaatgcatgccgcccagcgaggaaacgcgcggcgtcctggcgagtgccaccgattggggtgccgtggtagtggatcatcacgccggcaacctcacggtttcgatctccacgccctggtgaacggccgtgatccgctgctcgccgccaaagcgttcgtgtaactggtcagcaatcacttcgtggaaaccgcagttgatcagtgcggtggcggtgcggatgtgctcgacgcggatcatcgcgggcgagtggatctccagcctgtagatgatctgctcaccatccgctggacactcggcaacgaaggtatggcggtagatgttcatgcggcgggctccttggtgtcgtggaagatgtcgagctgggccaggccactgcgcgcggcatcgttgagccagaggcattcgatgcggtcgcgcgcgccgtcggcgagggcattccgctcgaggcggtgccagtggcggtaaatgcggtcgtagaggggacaggggtatccggagaggaccaccatgccgctcagccccttgaggaacgcagccaggtcccggtgctggtcgtcgtccagttcgtgtcggtacgacttgccggtggcgttgtggcggaccttggtgctgcgagtggaatggacgtagggcgggtcgacgtagtgcagcgtgctcggccggtcgtggtgctccatcagcaccagggcgtcgcggttctcgatcaccacgccctgtaggcgctcagtgatagcggccaacgcatcggggtagttgcgccagtccagcgcgggcgcggtaccactcctcgccgacgtcgagcggaaccccgtgcgttcgccgctcgccgcggcgctgccgaaaccctggaaactgcgcaccaccatccgccgggcgcgctcgagcggatcggacgtttccgcgtagctggcttcgaactcttcccgggcaaacggggtaagcgccagggcctggcgcagttcctcgccacggtcccgcgcgacgcggaacaggttcactacgtccccgtcgaggtcgttgtaaacctcggcgtagctgcgggccttccgcagcaggacagaagccgcgccgccgaatggctcgatgtaggtgtggtggggcgccaggtgctggatgatccacggggcgagcagccacttgccgccgtggtagcggagaatcggtcgttgaggaggcatcgtcagtactcggtgaacaggcactggacgccgccctgcctgacgcgggcggcccacgaggcatggttgaatcgcccacagggcggcgtccggtgcgtgctggaagagatagcgccccgggtggggcgctcggcgggtggcgttagagcgggcggatactgcgcgccactttcgggtcacgctggatgtagcccttgttctcgagggcggtcaggcgctgctggatggcgaactggcggacgccggccttggctgccagttctgcgacggtgggtgcgtagcctttctccgcccagaacgctcggatgtgcccgagcgtttcgttctgcatcgtcgacggggcctgcttcacggctgagcctcgcgagatccgtgcgcgttcatcgccccgtcttgcttctgcgctgcaaccttcttcagttggctggcgagatgtgccggcagaccgtggatcagcagggtgtcggagcctgagtcgaactccaccttggtgccgaggaggtgtgcctcgaagctgatcgacaggccttcggcgcggccggtgaagcggcggaactggttgaaggtgcgcttgtccgccgggatctccggcgacaggccgtagtccttgtgctggatgaagtcgtagaacgcccgtggctgctgttcgtcgatcagttcggaaagggcgtcgagggtcatcggctcaccgaggcgtgcctgcgcggtggcgtagtcgaccagcgacacggttttttcgcgggcctgttcctcggccatgccctcgctttccacgaagtcgctgaaggctttcagcagggtgcgcgtctcgcccggcgaatcgaccccttcctggcagccgatgaagtcgcggaagtagtcggagagctttctcccgcccttgcccttgatgaacgagatgtactgcttcgactgcttgttgttgcgccactcggagaggttgattcgcgccgccaggtgtaactggccgaggtcgaggtggctcgacggggtgacgtccagtgactcgttcaccgccgccccttcgctgtggtgcagcagggcgatcgccaggtagtcggtcatgccctgctggtagtgggcgaacagtacgtagccgccggtggagaggttggactcttccatcagcttctgcaggtgttccaccgcctcgcggctgaaccccacgaagtcgcggtcgccttccaggtactcgccgagccagccgctgaacgggtaggccccggactcgccctggaagaagccccaggccttgttcttggcgttgtagctttcgttgaggtcggccagcaggttctcgatgacctgggagttacccagctcagcggcgcgcgcatggagcacggtcggggtgccgtcgggcttcttgtcgatcaggtggatgatggaatggcggataggcatggctgcctcctatgttggtgaggtggtcagacgcctacgggaacttcttcgccgcccagtgctaccagcagctcggggatgaattgctggaaggtgagcatcatcaggacgaagctggcgtcggcctgtgcgaactcgtcggaatccttaccagcgtcgtccagcgcccgctcctgcagcaggtcgtcgaagcggaggctgcggatcaccagaccctcgtcgagtacgaagtagaggtctttcttccaggcgagagcgagcttggtgacgctcttacctgagtcgaggtgctggcggatcacgtcgctggtcaggtcctggtgcttggcggtgatgctgccttgctcgtcggtgtcgcggagcagggcgccgtcgcacagccagaagtcgccacccgcattagtttcttggcttcgcagccactcggtcatggttgccgtcggcgaaaccttggttgcgatcggtcgggcggggagagagcccagggcttcgcgcaaggtcgatagcagatcctcggcggccttcgccgtggcggtgtccacgatcaccaggccttccgccggcatgattgcggcgaaggtgcgcttgcggcgggtgaacgcgcgcggtaggagggtctggacgatctcgtccttcaactggtcgcgctctttcttgtagaccttgcgctgctgggtttcctcgatctcttcgaccttctccttcagtgcgtcgttgaccacgctgccaggcaggatcttctcctccttgcggcagcagatcagccagaatccgttcgcctcgcgtaccagcggtgcgtcacccttgccgaccggcggcgcgaagccgtaggtggtcaactcctgggaggcgcaggggcgcgctggtttgctcgccagggcactttccagagcgctggccgttgtgtcgatgggttgggtgaggcggtagatcagtaggttgcggaaccacatggtgctgtctccgggcggcccggcgctcagacgatgcgccagagcctgcggtaggggttgtcgaaggggatgtcgtcgtcgtagctgtcgtagtcggttgccggttgcggctggtggtgagtggtcggccgcggtggcggctcgcggccagggccagggccacgcgcctggcctgcctgctcaggcttgccgccgagcagttgcatgttgccgttgatgtccaccactacctcggtgctgtagtggtcctggccgtcctggccctgccacttgcgggtgcgtaggctgccttcgatgtagacctgggagccctttcgcaggtattgcgctgcgatttcggccagtcggccaaagagcaccactcggtgccactcggtgcgctcctgctgctggccggtctgcttgtctttccagctttcgctagtggccagactgagggaggtgaccgcctttccgcccggggtagatcttgcgtctggatcctggcccagatggccgaccaggattaccttgttcactccgcgtgccatggctcaggcctccgcctcagccggcggcaccgaactggccggcgccacatcgactccctgcaaagcgaagtagatgctggcgcaggcttgggcgtccggcatcgcgcggtgagcctccacaaggtcctccccggtgaagtgcttgtatgcctcggccaaggtcggcagcttgttgcggggaagcgcgacctgtgcgcgggagcgatagcaggtgcagaacttctcacccgattccttgaaggcgttggccgcatcctcgtcctggtagcgcatcagcgcgatgcgagtgatacggtcgtcgaagctgatgttgtgcgccgcgcggcgggctgcgcggccgttgatcgcaagaaagccctccagagcctcggcctcgctgatgccaacatccatcgcctgttcgtggctgatgccgtggatcgctgtcatttcgggggtgatttcccagccgttgggtcgcacgatcgcctcaaagcgatcgatggtgttgccggcggcatcgcagagcagagcggcaacttctacgatgtggggctggcacgggtcttcactgggcaacttccactcgggaatacccgtcgtttcgaagtcgaaaatgttggtgagcatggtctgtcctcagtggttgggcatcaggctgcgcgctcgatgaacgcgcacccggatgccgcaccggcggcgggcgccggcgcaggcggttcggagggatagggagtcggggtcaggcggagggaatggtcaggctgctttcgcgggtgactcctcgacgatcacgcccggcagattcagcgtttggcccttgctgttggccaggctgtccagtgccggctggtcgacaacgagcaagtcctcggtggccaggccttcggcgatggcggcgatgaacgcggttttatcgacgacgcgggcgcgccactgggtagcgctgggctctgctgccttgccggcgggcttgatctgggcgggcgctggtgcaacctcggccttcggcgcctccggctcgacagcgacgggcgtgtcctgctcggcgagctgctggcgcgcggcggcaagctcctgctgctggcgcgccagttcttcgcgttggcgttgcatttcctcttgctgccggcgcatttccgcctgttgctcctccatgcggcggcgcatttcggcttgctgggcttccaactcctgccgctggcgctccgcttgctcgaaggccaggcggtcggtcagcatttgggttagttcgtccatggccgtctgctgtgcggcttgggcttccttcgtcaagtcgtagaagtcgtgtgctgtgtcgatttcgccacagcggtcgatcatcgcggcaatctcgtcgctggtcttgccgcgtacctgggccggcatccctttgatggcgtcgaccttcgacagcaggcgtgcgattcgttcctggcgctcgcgttcgacgcgatcgtcgacctccttcttggcggccttcatcggatcttccaacgtcaccagtgcggcggtgatccgcttcgcctcggcgtcgatgatctggcctgcctcgatgtaaggcgccttttcacgcttgcgagcggcttccaggctggtgcgcagtgtggtcaattccttgataccggccttgatgaactcgtagccatcggcggtattggcgtccggcagcgtcgcgtacttctcgcgaagttttgccagggcggcgttggttgcgttgtactcggcgacctcgacggtaccgttttccaggtcaacatttttcaggatggtcatggtgtcattcctcggggctggtaggagcgggggaaagctggcgcaggcgctcatcggcggcttcattcacgcgcagctcaatctctgaggggttgaagttgacgactggcgctttggcgcgggccttctcggcgacttgcttacgcattaactccagggcgcgggagttcggtgccgcggcgatcgcgtcgagttgtgcgcgaagccaggtcttgaattcgtccttggcttcgtccagggctgtctcgggatcgccggcatcggccaggcgctctttcagcttcaggccttcgacataggtcgtgtcgtcgaacatgcccatgtgaatgtcggcgctgaacccgaggagtgacagacacttcttgatggcgtcggtgagtgacttcttgccgtagtcgtggtcagtcttgaagccccactcggtcttgtagacgtagggggtgtgcccgtattggcgggcgtgattgatcgtcccgtcgtggcgataccagagttcgatgtacagggtgtgggtcttgtcgtggcagatgaccgcaccgttcttatcgaggtgcggtgcgccttcatcgaagcgctctaccaagactttccagccccagcccttgccgacggggccgaatagctcagtcgcacgacggacgatatacaagccgttgatggacgtcatgtcctgaccgttgagcttcgcctgccttgtgtacctggtgtccgtctctttcacctggtcccagatagccatgttgctattcatgtttgtcatggtgttgctcgcttgacggctgccggcgccgtggctggttgttccgcggtaatcagtccgccccagatcgggcctagggcgagaatgagcaggaagaggaggccgccaatcaggccgcccacccagatggctttgcgtttcgcgttcatgtcgggagcatcctgtagatcagccagccgtaaaacggagccaccagggccagcacgccgatggccgacgcaacttcggtgagcgcccggcgggcgccagtcgcatttggcttcatgcggaggcccctcccttggctttgtcgattgcgcttcgggccgcctcgatcgccgcagttgtgatcgcgttgcgatgctgcggcagatagccgaccagcgcgcagtacgcctgctccagggcgatgagtaattcggggccgtagctttcaacgcgccgccgtgctgcgcgttccgcccgcgtgcggttgtcgcgctcgattgcagactgcgcttcctgttcggtggcgtagaacctgtaccagtcagcgcgcttcgcgatgcgcgtgccgtcggctcgaacgtagtaggccttcgtttcccgaacgaactcacagcggctagctgcgtctcggccggcccggacttgaaagcgggtgattggattcatacccgagtgctcctgagttctgcccagcgggcgtccgacgcggcgtcgagccggtggcgcatgtcgtcgtaaatacgggtgtcgatgaagccgaccgcataggccagttcaatttggccgtggacgaacttctggtccgggcgcgggaacggtgatcggcgcatcgccgtaatgccttcctcgatcatcagcaccgcgcgttcattcgcccaggccatcgtcgtcctcctggttttcgtcctcgggctccgggtccggctggtcccagagcgggtctctggcgaagtcccaggcgtgctgggcgttgctgaaagccgcgcggttgcggcgttcgcggtatgtccacatcgggatgctctccgtggttcacctgcattcggctgaacactcgcgccgccgggcttgcccgatggggaggcggggagcgttcatgcgaatgtgggcggtgaaaaaagcccggccgtagccgggcaagggggggatgaaacgggctcaggaaacagcagtgcagttgcgcagcagcaccggcgtggcctgaccttctagccagatcaccgccatgccggaggcggaaactttggcttgagtgagcgttctggtgcggatggggatggagtcgcggagcggacggtactcaacggccacctgggccgggtgcgtgcgattccactcttcaaccaggtctttgggtgaggcgggccggacggcgccaacccgggcgtagatctcggcgcgatgaatggccatcgcttccggagcaacgattccgaggcggatctggccgcctctgttctcgacgacggtcacggtgatgtcgtcgccaatgtgcagggtttcgccgactcggcgagtgaggatcagcatgtgtgcctccgttcaggatgctgggcgcgcgggctcaagccggctcgcagtgggaaagggcaacgcaaccagacacgcccgcgagccagacgacagcggtgtggccgccgaggacctgggcttcggttgtcgtccgggtgcgcttcggcgtggcgtggcgatgaaaccgatagttgacctcggtgccggcggggtatgcggaattccaggcagcaacggtcgccgccgggttggcgtttcgcttcatcgtgtgtctccggatagagttcggtggggctggtgatgccctgctacgggcagggctgcgggttaaagcgggaaggccgcacgcgcgctgccagctcgaataaagagaatcgccagcttgcgaaccttcagatacttggctcttgtctggcggccgctgcggctcagcttgtccatttcgccaacccaagcgttgtagatgttcagcgcgtagttgctcatgtcctttcctcggtgatgccccggcgaaccggggcagtgttctcacaggcgtaacaaattccggtagccgtcacccccaggcgcccacactcggggcagctcgcatcgctgcgcacctgctcctgcgcctcctcgtagcaaccatcgcagcggaatccgtcggacgtctcgatcacgcgaccgggcgcgttgcaccggtcgcattcgtgaatgattgtcatcgggtcgactccttacatcacgcatgcatccgcacggtgatgtagccgttgctggcaactacgtgctcccaacaattgaagaagacggactgtccgaacttcttcatggccgcctggcgaaccttcacctcaacgtccagaggctgttcaccagcgtccggcagagcaagccattgcaggctctttccgtcactcaggtgggaatcgatgttgaattgagccatttcagtctccttaccagggtttaccggcgttgatgtatgcgcttcctgctagctcggttagagctaatagctgccaggaatcgatcgctccgccgtagtgcaatccgcgcaacatcccgaccgtttcgtagtactcgatgcgcgctcggtgtacatcgctctccctgcgaatgattcgaagagactgacgtaaagccagtaaggccttttcattcatcgtcttgccctccagggcgtgttgacttcttcgatgcccctcttgcgaagggcatctgagaaatcggtgttgctggccggcgttacgcgccacctccggctgggcgaatgctttctcgggggacctgagatcccgacagccggccacgctttgctgccgactctcgcttgcggtgctcgaagctgcacacccggggcgaggcgtcccctgaatcccgttctgcctgtcggcaaggccttggctcgctgtggcctgttctgtcgtcacgatgttctgtgtcgatgagataaaaattaccagtggcatttaagtaatgtcaatgctgatggtaataaaattttccaacgctcatcaggcacaggttgaatgggtgaggtggtgggtatactgtatttatatacagctaacgggaggtgcttatggctaagcaacagaagaagcagcaggtggtgaaaccgctgacggcagccgaacggctgggcctgcgcgtttcagagatgatcaattcaccgaaggctcaggatctgaggatggtgacaattcaccggctggacacggattccgatgaagcctgggagggagtgatgggagtacttgccgagacggacggtcttgagctgatctttaacgatgacggtaccgtcactcttaagtgggagaagcaggagagggaggaggaggcctggtaggctggatacgaaaagccccgcgtggggcggggcttgttaagcaaggcgcgtatcagtgcttcctacgtctgagtaccgaccaccagaatacccagcccatgatgctgaggttgttctcgcgcatctggtccttggtgtactcctcgtctgggtattcgtcacggttaaaactgcgtaggcggatgccaccaccaggcaatcggtagacgaacttcacccgtagcatgtcatcgtgtttcaacgcataaatctcgccatcgattatcgtatgggcggataggtcaaccccgatgatggcgccatcggcaatcagaggctccatgctgttgccactgacattcacgcagaccgaatgttttggatccacccccgactcgcgcagaccagccttcgcgaacctgattttttgcttggcctgctcacggtcgggatagcgaccgtcccccgcggcgatttggatctcgtcgaagtacggtatttcaacctcatccgggtcgagcgggtcccccacctcgaaactggacatgggcgtaagttcgccctctgtctccgctttaggcgccggccggagagtcttcgccatatccgttatttcgtccgctaggcgcggactgaactcccgaacatgaacctggagaatttctgcgaatgccgccgctgcctgggcgttcaaagggttcacgccattcaggtagtggctaacggagctttggttgatcccaaggaggtgggcgagcttctcctgcgttagaccgaggtcacgctttctgctgttgaagatggccttcagttgaaggcactcgtcttttctgtctggtggaagaggttttttgctcatcttcgaatcgtattcccacaggtaatatttcagcaaatgcctatagcattgaaatgtttaaatgccacaggtaatattctggtgtgaggaacactttggagagcggtcatgaaccgagtacacatcaagacatttgcctccgagcacgggcagtccagggctgcggcgctactcggcatcactcaaggggcactcagcaaggctttgcgtgttggtcgtgacatctacgtcaccgcgcatgctgatgggactttcactgccgaggaggtgcgcacctttccggcccagaaggtgcgcttcgtttcttgacatggactggttcgtagcaggcgtgactgctgcaagtagatgcgtcagccagcgcttggcgcaggagaaccagggcctatgggaaccgagaacagggctgacatgcagttcaccgtgacgatcaatcaagcgaaagcgctcgagtgggggctgaactcgcagcaggcgctgctgttcgccttcgtctacgagtgcccgagttgggcgcgcctggttcagacgcccgcaggtgatttctacgccctgagcaaagcgaagatcctcgaggagttgccgctgctgacggacaagccggacacggcgtaccgcttgctgaagcagatcgctgcggccggtgtgatcgatctgtcgagcacagcaaccatcacactcgtgcggctcactgcgaaggggcaggagtggaatcggaaactggacgggtcggaaaaatatccgacccaggtcggagaaaaatccgaggtcggaaattcttccgaggtcggagaaaaatccgatgcaggcagttcggaaaaatctccgaccaagatcggaaaaaaatccggggtaggtcggaaaaaaatccgttcagggtcggaaaaatctccgacaaatcaggtaaccagtaatcaggtaaccagtaatcagggtaccaatcaggatattgccggggaggctgcgccggccccgggcggggaattcgtcggcgccgagcaagagcccgggccgcgctgccagataccggccgacatgccaggcccgaaagacccgaactgcaaggcgtaccgcacatgggccaactacgccatggcctatcgcactcgatacaccgcttggccggtttggaacgcatcggttgccggcaagctttcgaagctgatcgatcgtgtgggccaggccgacgcgccaaaggtggccgcgttctacgtcaagtgcatccacgatgctcgactgattgctcagcaccatcccctcggcctgttgctggcgaacgctgagggctaccacacgatgtggttgaccaatcgcccgaccaccggaacgcaggcacgccagcaggagaacaccgcatcgaacttgtccgccgctgagcaggccctggccgagcagagagcgaggagggctgcccatgctgacgcctgagcaacaagacgaactgctgctttcccttttcggcaccgccgaggcaatgggtcagcaactcacgccggccgctgcccaactcatggttcaagacctggctgcctacgaagagccagtgctgaccgccgcattgcaggccgttcgccgggagggcggacgattcacggttgccgctgtactccggcatgtcgagtccgccgacggtcggcccgagccgaacgaggcctgggcgatcgccctacagagcttcgacgaggctgaaacggtgcttatgacgccggaaatccagcaggcggctgtggtagccgcaccgctcatgaaggggcgtggtgaccgggtgggcgcgcgcatggcgttcattgccgcctacgagcgcctgctcactcgtgccaggcagcaggcgctgcccgccaggtggtcgctgtcgttgggcagcgatgcgggccgccgagctgctgcgatcgaggaagcggaacgcctggggcgtctgccggcgccggcagcgcagttgctgctcgaacagcacgtactcgagccagttacgccggccggcagcgcaatcgccgggcttctgactggaccctccgaccggctactggcactgacgaatgacccactgacccgcaaagcccttgcgagggaggctgctggtgggggggatgtgccagacgactttcgccggcggcttgaagacatcaagaagcgcttggtccgcagggaaaaggcgaaggtccgactgcgtgatcgccacctgcgccacgagcgcgaagacatggaccgtcggcgcgccgcggttcttcaaaccatcgatcagctacagagccaggaggttcaacatggctgaagcactatcaacccaggcgccggccaagagcgcggcggcgaagaggaagcgcgccgggcggccgatctacctggagttcaagcgcatggtcgacccggacaccggcgaggttcgcctggccctggtcgccgacagcggcatcgacaagttcctgctgaaggagcgcgggtataaggctggcgcaaaagtgcgcgcagagctgaagcaaccgcgggacgttcgtaagcaccgcctggttcacaggctgggccaactggtcgcgcgcaatgtggatgggttccaggggatggatgcgcactcggtgatcaagaagcttcagggagacgccggggtctgctgtagctcggagtatttcgacctgggcgggctggggcgcgtgtcgcgcctggtgccggagtcgttggcgttcgacgaaatgcccgaggagcggttcctggagttctggaggggcatctgccagcacctgatcgcgcaccactggacgggcatgagtgaagagcagatcggcgacatgatcaacatgatgcccgaggaggtggtatgacctggagccgcgacgactactggggattcgtcgatcctgccgcggaggtggtgtgatgctggtcgccgcgaagaagcctcgcaagaagacgtgcaaggcgtgccgggaggtattcaccccggagcgatcgctacagtcagtgtgcagtccgaagtgcggattggcgttggcggctgccaagcgagagagagagcggaagtctctggcgaagatagagcgccgcgagatccgtgcggccaaggaacgcttcaagacccgttcggaccatatgcgtgaggcgcaggccgctttcaacgagtggattcgcctgcgcgacgccgacaagccatgtatcagttgcgattccacggcctgtgacacagggctgatcaccggcagtcgctgggatgcagggcattaccgctccgtcggtgcttgtcaggctctgcgcttcgagccgctgaacgtgcatcggcagtgcgtgcgctgcaacagggacatgtccggcaacgcggtggagtaccgcatacgcttggtccagcgcatcggcgccgagaaagtcgaatggctggaggggccgcacgagccccggcggtttcctatcgacgaactgaaggagatcaaggccaagtatcgagcgctctctcgggaactgaagcgcaagatggggaggggagtagggcatggctgaccctcagttcaaggagtggctgcaggagcagtggcgcattctgcgtcaacacgggctcatcgctgaaggggagagcagatgaagaaatcttcgacccaggttgtactcgacgccgttcgggaactgcacagccagcagcagatcgttactcgccagaccctggtcgaactcacggggctgaagcccggcgttgtcgatgaccgcctatccgtcctggtggacgacttgctggtgctgcgcgtcgagcgcggagtgttcgtaccggcaccgcagttcgatccgcccaggccgatcaccatcacgcagataccaggtggctgggcgaaggtcgagatcagcgatgatcacgtaatcacgcttaccccagcggagaagcggatgctcggcgaattgctggcgggtgcggctcagcagttcgcagcgatcgatatcgggcattcgaaccagatactggccgcagagctggcgatcaagatacggaagctggaaagagaagtggcagcattgcgcgcggacaagaccgctggcgactgcgaaacccagctttccctgtcgatggaccacatcgcctgatccccctgtaaggttcgacccatcccctctggcccggacaattccgggtcatgactcagaagcccagcaccaaaccgaagaaggccccggtagcgaagaagcgcgctactggggcttccgcacgtcccccagccaagaccgcagcgaaacgacccccgggtcgcccgagcaggtatacgcccactgtcggcctagctgtctgtaccgcgcttgcggagggcatgagcctgcggaaggtatgccagttaccgggtatgccggcgatgtccacgttcctccggtggctggccgacgagcagcatgcagatttgcgagagcagtacgcgcgcgcgcgcgaggcacaggccgacaccctcgccgaggagatcctgcagatcgctgacgacggctcgaacgacacatacacggacgatgaaggccgcacgcatgtcgactacgaccatatctccaggtcgaagctgcgcgtagatgctcgaaagtggttggcgtcgaagatggcgcccaagaagtatggcgaccgcatcaccaacgaacacactggcgcgaatggtggcgccatagaggtcaagagcacagtcaccttcgtgcagcccaagccacgaggtgacgacgagtgaccaccttcgtcgctgcgcctctcaacctgaacatcacgctccccttcaaactggcgccactgtacgaggcgcgccggtacaaggtcatgcgtggtgggcgcggcggcggtaagtcccatggcgtggcccaggtgctgctcgacatgggcgcgcgcaaccccctgcgcatcctctgcgcgcgggaaatccagaagtctatgcgcgactcggttcaccggctgctgcgcgactacatcgtcaagctcggcctgaccgagttctacgaggtgctggacaccgagattcgtggacgcaacggcacgctgttcctgttctccggactgcaagggcacaccgtcgattccatcaagtcctttgagggcgtggacatcgtatgggtggaagaagcccagggcgtgtgcaagaagtcctgggatgtgctgatcccgaccatccgcaaggacggatcggagatatggctgacgctcaacccggcgatggacaccgacgacacctacgtgcggttctgcgccgcgccggatgacgacgtgtggctctgcgaaatcaactggcgcgacaacccgtggttccctgatgtcctcaaccaggagcgcctgcgcgccaagcgctccatgtcgcaggaggactacgagcacatatgggaaggcaagccgcgcaccgtggccgagggtgccatctaccgccatgaaatcctggacctgatggaaagcgggcgcgttcgcccggtgccatacgaccctctgctacccgtccacacggtatgggacttgggctggaacgacgccatgaccatcggctttgtccagcgcgggccgatggacgtgcgaatcatcgactacatcgaggacagccatcgcacgctggattggtacgtggcgcagatcgagaaacgcccgtatcgctggggcatcgactacctgccgcacgacggtcgtacccgcaactaccagaccggcaagagcaccgaggaacagctacaggcgatgggccgcaaggtccacgtcctggccgccaccagcatagaggaaggcatcaaggccgtgcgcatgctgttcccgcgctgctacttcgacaaggacaagaccgggcgtctggtggagtgccttaagcgctaccgccgcgccctgcaccagcataccggagaggccatggctcccctgcacgacgaatacagccacggctccgacatgttccgctacgtcggccaggccgtggaaatcatgcccaacgaaatggaacgcacctacgaggaagcggaagcgcctgactggcgactgtgaggacacgacatgcagatcactgagaatgaccgccagtacatgaatggcctgccaccggccggcgacacgccgctgaccgtggacgagtacgccgacatcaactacgaaatcgaggaccagcccgcgtggcgcgccgtcgccgacaaggaaatggattacgcggacgggaaccagctcgacaccgacctgctgcgtcgccagcaggcactgggcatcccgcccgcggtagaagacctgattggcccggccctgctgtccctgcaaggctacgaggccgtcactcgcacagactggcgcgtgacgccgaacggtgacgtgggtggccaggacgtggccgacgccctgaactaccggctgaacacggcagagcgccagtctggtgccgaccgcgcatgctccgaagcgttccggccgcagatcgcgtgcggtatcggctgggtagaagtcagccgcgagtcggacccgttcaagttcccgtaccgctgccggcctatccgccgcgacgaaattcactgggacatgaagtgcggcgacgactgggaggcctgccgcttcctgcgccggcagcgctggctgtcacctgatcgcattgccctggtgttcccggagcatgccgagctgatccgcatggtaggtaagtacggcagcacctggtggggccagcccgatctcggaatgatggaaggcggcacatccaccggtctacacaacgcatggaacgaggcgcgggcctggaccgtgcaggaggaccgctggtacaacccaagcagcaaggaaatctgcctggtggaactctggtatcgccgctgggtgcaggtccacgtcctgaaatcgcccgatggccgagtcgtcgagtacgacccgaacaacctggcgcacaacatcgcgctggcgtccggccgcatttcaccgaagaaggtgacggtatcccgcgtgcgccgctcctactggctcgggccgcactgcctgcacgatgggccgagcccatacacacatcgccacttcccctacgtcccgttcttcggtttccgcgaggatgccaccggaattccatacgggtacgtgcgcggcatgaagtacgcccaggacagcctgaatagcggtatgtccaagctccgctggggcatgagcgtcactcgagtggagcgtaccaagggcgcggtggacatgaccgacgcccaactacgccggcagatcgcacgtccggatgccgacatcgtgctgaacgctgagcacttcgcaagcaacaggggcgctcgcttcgaggtaaagcgcgactacaccctgaccgaccagcatttccagatgctccaggacaaccgcgccaccatcgagcgcgtaagcaacatcacggccggtttccaagggcgcaaaggcacggccactagcggcatccaggaacagcagcagatcgagcagagcaaccagtcaattggccggatcatggacaacttccgcgccggccggaccctggtgggcgaactgctgctggcaatgatcgtcgaggacatcggccaggagcgcactgaggttgttatcgaaggcgatgccgtgaccgccgatcgtgtcgtggtgctcaacgagccgcagcgcgatccgcagaccggcgccgcctacctgtccaatgatctgctgcgcactcggatcaaggtcgccctcgaggacgttcccagcaccaacagctaccgcggccagcagctcaacgcgatgtccgaggccgtcaagagcatgccgccgcagtaccaggccgctgtcctgccgttcctggtcagcctcatggacgtgccgttcaagcgcgacgtggtggaggccatccgagccgttgatcaacagcagaccccggagcagatccagcagcagatcgaccaggccgtgcaggacgccctggccaaggccggaaacgacatcaagctgcgcgaactggagatcaaggagcgcaaggcggatagcgaaatcagtgggctgaacgccaaggcagtgcagatcggggtgcaggccgcattcagtgccatgcaggccggcgcccagattgcgcagatgccgatgatcgcgccgatcgccgacgccgtgatgcagagcgctggataccagcgcccgaaccctgctggtgacgacccgaattaccccgtagccgaccagacggcggcaatgaacatcaagtcgccctacatccaagggcaggggccggcagcagcagaagctgaggccgaggaggctccggtacgcaggaacaccagcccgacatatccgccggtgccggccgaagccccgaccggccagcgcggaatagagacgccgagtacggctgacaacctgccgcagccctgacacacctccgctacaactcgccaacctgaaaccctaccgggccaccccctgtagggtttcgttcttcctgcacctgtctccgacactgccgcccaagccaaggcgtctccgaacgccggcgagacgcggagtaatccgcattgctgatgacccttgcggccacggcgatatgtggcgggataggcatgaaaaaagacgagcttttccaagagatagacggtggacggccgacacctgaacaggctgccaggatgattgaactggcaatgggcgataccagcaatttcatgctggacagcgacgagcccaacgtcgcagccgacgagggtgccggcgatgctggcgaggccagcgccgatgccgccgatcaggtagacaacaccgaacagaacaccgacgcgcagcagggcgcgggtgacgccggcgcttcggctggtggcgaccaacagggcaagacgcccgaggccaaagagctaaacgccgagaacgccgtgatcctggccaaggacggcaagcacaccatcggctacgagaagctggtggaagcgagacagggagaacagcactggaaggcccaagcccaggccgcgcaggcagagctacaacgcctgcgggatgaggcagcagcgcgcgccacggcaggcgaggccccgacgtcgcaggacaaccaactggcggcggctcaggctgccatggatcagggggttgacccggcgatcttcggagacttcagcgaggaagcgctggccgcaggcatccagaagctgatcgacgcgaaagtggaagcgcgcgtgagcgcactcgtggaccagaagctggcaccgatccagaagaaggaagccgagagcgccgcgagcgcccacctgaatgcgatctacgaggcccacccggacgccgactccattgcggagagcaaggagttcggggactgggtggcgtcccgtccgtcctatgagcgcgcgagcatcgccaaggtgctggaagacggcaccgcggccgatgtcatcgaactgttcggttcgttcaagtccgccaccggaaacgctcagcagtcgcagcagcagccgaacgcgcaagacgcgaaggctgcggcccaggctgccatcaacaaagccaagaccgaaccgccggccagtctctcggatatcccgggcggcaagccaccggctggcaaccgattcgaggccatcgccgcaatggatccggcatccatgtcggacgccctgcgcggcatgagccccgatcaggtcgaggcattcctgaaccggaacatgtaagggagctaccccatgaccgcaagcaaaaccaccatgcgttacggtgatccgaacgcgatgatccaacaggccgccggcttgttcgcgctctgccagggccgcaactcgaccctgaaccgcctgaccggcaagatgccgagcggcaccagcgacgccgagaagaagaccaagggccagtcgagcctggagcttcccatcgtccaggcccaggacctgagccgcaacaagggcgacgaggtgcgtttccacttcgtgcagccggcgaacgccttcccgatcatgggtagcgagtacgccgagggcaagggcactggcctgaagatcggcagcgaccaactgcgcgtcaaccaagcccgcttcccggtggacctgggcgatgtgatgtcgcagattcgcaacccctacgacctgcgccgcctcggccgtccgaaggcgaagtggttcatggacacctacctggaccagtccatgctggttcacctggccggcgcccgtggtaaccactacaacaaggagtggtgcctcccgctggagatgcatccgaagctggctgacatgctggtcaaccgcgtcaaggcgccgaccaagaaccgtcacttcgtggccagcgccgatgccatcactggcgttgcgccgaatgcgggggagtacaacatcaccaccgccgacgtgctggacgtggatgtggtcgactccatcgccacctacatggaccagatcgagctgccgccgccgcccgtgaagttcgagggcgatgaggctgctgaggattcgccgatccgcgtcctgctgtgctcgccggcccagtacaacagcttcgccaagcaggagaagttccgtagttggcaggctgccgcactggcacgcgcgtcgaatgccaagcagcacccgatcttccgcgtcgatgcgggcctgtggtccaacaccctcatcatcaagatgccgaagccgatccgcttctacgcgggcgacaccatcaagtattgcgccgcatacaactcggaagccgagtcgagcgccgtggtgccggatagcttcggcaatcagtacgcggtggaccgcgccctgctgctgggcggccaggctctggcgcaagcctgggcggcttccgagcactccggcatgccgttcttctggtccgagaaggacatggaccacggcgacaagctggaactgctgatcggcgcgatcctcggctgctccaagattcgtttcgccgtcgaggcgaccaacggcttggagtacaccgaccacggcgtgatggcgatcgacaccgccgtcaagatcatcggcccccgcaagtaagcgacaagggtcggtgatcccggccctttccttcgtccagattgaaaggaggcccgttatggcccagtacaagaccatcccgctcggcggccagttcggcggtttcacgccgtatggcaacctgaccaccctgcgttaccagctcgcgaccaacgcggccggcgttctgctcaacagcaatgccgccgccgcgctggcggttggcgatgtcgtggcgttcgagttcccgttgcccgccggcttcgtcgccgaagacctgcaactggtgatttccgaccacttcggtgccggcgtgaccgctgacgtgggctttgcctacgccgacggcgtggacgacgcgacctatccgcaggacgccgcatatttcggcgctggcctgctgctgtcggccgctgcgcgcctgcgcaccagttccagcaaggcgctgttcgcgctgcccaaggacgccaatctggttatcaccatcaaaggcgctgccgtcgcggaggcgggcaagctccaggtgatcgtcctcggcgagcgcctcggcgcagtctaagcgccgccgccccacgaagggccggcccgtgctggcccttctgtcacgcaggagtaggacattcatgaaacccatcctcatcgccaccatcgcccacgcgatcaattccgcctactgcctcgccatcggcgacaaggtggcaccaccgttcgccgagtgcccggaagacatgcagcgcggcatcctggccggcgtgcaactccacctggacaacccagacaccacccccgagcagtcccatgagtcctggctggcggacaagctggccaacggctgggtccatggcgaggtcaaggacttcgaggcgaagacgcacccgtgctgcgttccctacgccgagttgcccgagtcgcagaaggtcaaggactatctgttccgcgccgtggttcatgcactcaaggacatcccggacgctgggagcctggacgccgacgcgcgcgtggctgagttgcaagaccaactcaacgaggtgctaggcaagaatgcggccctggtagcgcagatggcgagcgacggcgtgcccatgctggataacggcgtgcccatcaagtacatcggcccgcgggaaagcttcaccgaccgcctgtatggctccgggctgatgttcacccaagggcaggtgcgtagcgtgcccggcgacctggcgcgtcgattcctcaaccatcgcgacctgttcgagcgctccaccggccccgcgccggccggcgacgacaccaagcaggtgatcgcgcaggctcagcaggcccagcaggagcgcgctcgcaaggaggaagacctatcggccctgcaccgggaggtggacaacttcgccgacttcaccagcctggcggcattcgccaaggaccgctacggcctgaacctggtcaagcagcacggcttggcgcgctcccgtgatgccgtccacgcgcgcatcgaccagttcggtggcgcggtatgacgctggccgacctgatccgccgagttcgcacggacgcgaacgacatggtggagccgtatttctggtcggaccaggacgtggccgactggctcaacgacgcagtgcgcgaagccgccgtgcgcggcaggctgatccacgagagccaggccgacgccgtgtgccgcatcgaggtggtcgccggaactgccgtctacaagttgcatgcgtcgctatacgaactgtcgcacctgggcttctacccggccgatatgtcgcgcccgaccatgccggtgctgaagtcggccgaggtgctggatgcagagaggcccggctggcgcgcctgcaccggcaagccgctgtacgcgatccagcacgacaccacgctgcgcctggctccgacccctgaccgcgccggtatcttgcgtcttgaaggctaccgcacgcccctggcggacatgacgctgaccgacaaggacaccgtgcagccggagatacaccccgagcaccaccggcacctggtccagtgggcgctgcatcgcggattcagcatccccgacatggaatcgtttgacccgagccgcgccgcactggccgaggacgctttcacggcctacttcggccagcggcccgactccgacctgcggcgcgtcacccgtgaggacgttcctcaccatgtagaggcattctggccatgagcaagaagatgagcgtggacctgaaggtcggagaggtactgctgatcgatggtactgccatccgcctggagaagaagtccgggcaggtggcgcgcctgcagatctcggccgacgaaggcaccgttattcaaaaccccgcagcagcgcgcaggagtgcgctccaagacctggagcacacccctgatggcaaataccctctatgactatgcccgccagcgcttcctggagggtcagttcaactggatgaccgacacgatcaaggtgatcttggtcgataccggcgcctacacgccgcagactgcgatccaccagtacctgtcggatatcccgtcgtcgtcccggatcgctggtccggtcactctcaccgcgaagaccaccactggcggcgccgccgacggtgcggatgtgacgttcaccagtgtgtccggcgcgagcatcgaggcaatcattatctacaaggacaccggtaccgagtccaccagcccgctgattgcattcatcgacacggctaccggcctgccgatcacccccaacggcggtgacatcatcgtcacctgggacaacggcacgaacaagattttcaaagtctgatcaaccacgcgcaggagtgcagaagatgctcaaacgcaagaataccgacaccaccacgcttgagattgaacagctccgcatcgaacttgctcgttccaaggcccgtgagcagggcctgctgatcgaacgggaaatgtgggtggagcaggggcgccagctccagaaccaagtccagacatggcagcgcatgtatgccagcctgttcgaccagctcggccgcggtgtggtgacggacaaggatattcaggacaacctggcgctcgccgccgaggccatgcggcagcccatcaccgccgtggaagccgttcgcgccgccttcgccatgtgccaggaggggacgcaaggccggtacacaagcgtcgggcgccgcaataagccgcgccgggtagcgaaggagggtagcgatgattggcgcaactgagcaggccgtgaagccaccgacacagggcatcggcgcgcaaggtatcgagcccaagccgatcgaactgacgccacctcaggacctacatgtcaactggcaggccgtcggcgcgctcccgcccttccagatgttcgttcacgagcaggctccatgtccgcccggccgctgccagcagcagtgggctatcgactacggtgtacgctacggcgcccaggtcggagacaaggtgctgctggagcgctatgcccagtggcaccaggcgaaaggctactggcccaacgaaacgttcctcggtcaaccggttgagggagcgaattaatggccgacaccatcgatctggacggcgaaaaattcgtctctccatcattcgtcaccagtgcggcatcgctcgacgacatctacaccgcctgggtggccgacttccaaggctcaacgactgcctataaccctagctggccgagtgcagatgatagtgcgacgctgctaccaatcccggcgctgtggaccggcggggccgataggttggttgtttctaccgagtgcggtgtggagattgtcccctaccagttcacctcggcgagtacgcactactcacaggcgatcgcaggagttagcaggtactactcgatcaactgcgggctgcgcctggcgattatcttccacccgactggtgtcgactcaggcattaccagcttttcgggcaactacaatgcggatctggcgctgtttcgaggtacgcataaccgaacaagtgaaaacgtccaattcgtggcgcgtgtggttcctggttggcaaatcgacgtagccatcaagaacaccgcccaaactgctggactccccgtcaagctggtggtgctcaatggcaccactgtggtgtcttccaccgacctgactacgatcgttcagggtggtgtcacactggtgacatgttccatctacggtggaaccgtctcgggcaccgtcgtggaccaggctggccagcctgctacccgcatcgtccatgttcacgagcgcgaaacagggtcggtgatcggtagaggacgcagcgactcatcaggtctgttcgaaattccggtcatcgcgaaggtgggtaccaccatgtacgtagtcggcctggacgatgagaactcgccgctgatcaatgctgtgatcgccgatcgcatcgtgctggagtagctatgaccacgggcgtagagctgcgttttgacgcagtacccagcggctacgtcccctccagcagtcgcaacgtcacgctgggtggcggcccgccggcgaaccttcccgaaggaaccatcggagcttggggcattcagccaccgctgctctcgcgcgatgcccgggtagtgcggacaatccttccggacccgcacgcatcggcggatctcgacttctctaccgttgaccccggctacgtgccgccagcgtccaatgctgtgctgcttcagtggggtgagttgccgccggtagagggccaaacggttttcccgggcggattcagcgattccatggtaccgccaccggcgatccgtactcagtatcgctttgtgttgcctgtaggatcgtcgcaccaagtgttcggcgccgccaaggcttggaagtacagcacgttcgtttcggcctacggcttcaactcgaacgtcatcggatcccacaacgcacagaacaagcaccgaacggttcagccgacaggatttgtcgcctaccaaagtgggcaggcgaacatcatcaaccgaaaccgttatgtggcggccggcaacattgcgccgccgccgtggggcgcgaatcccacggtttggctgtacacccgctatctgaagcctggcggcctactggcgaccgcgatcccggatgtccaccgcatcagccacgaacgccagttcgtgcagctcaatgctggtgttccagcgccaggcatggggacggcatgggtcagtcagggaacgcgcgttctggagcccattggcacgtttctggatgccgtggccagacctatggtcggaggcacgcgcttcttggagccgccaggctgggattcctcggcattcggcacgcggatcattcccgagtcgcagacggtcgcgcctcaaggcttcgccgagttgtgggggcagcaggcgatcaacaactggctcacctttgccgagccggccggattccagagcaccgtccaggaagaataccgctggggccgcgcagacgtgtggaacctgcgccagtacgtggtccaggagtacgacccggacagcgagttgaacccgccaccctggtcgcagtggacgctggtggagaaccgaaaccgtcaagtgggcaccatcggcatgccttcgccgccggccggcttcccgcagatcgacaacaatgccaggccgatcttgccaggcggcgtggcaccgccgcagatcaccactgcagccatgattgcctacggccgccgttacctgccgctggaaggcatcgaaccgccgccgatcctgaattggcatgccgtctacaacggcgcgagggtgttggtgccgaccgggaatgctcaaagcgctttcggtgtggcgagactggagaacacgcggcgttacttcgaccgcatcggcggcttcgactcggtggatatcggcattgcgttcatcgatttcgccattcgcggtatcagcatcgagccgcgctacagcatcgagccgccggatatcaagttgcccgaggtcaagctgtacacgcgctatgtcgatccggcaagcaacgacatgctgaacatgggcctggcggctctgtcgatccacttcaactcgatcgggccgaggtgggcgcacaaagacctgttcggcgatccgcgcatccacaacgtgacgccggaggtcgcgaccttcggggcgaacgccgaggaattcggttcggccttcgtgcgcctgcaatggcgtccggtggcgccggacggcagcaacatgcagttgttcggccaggcaaagatcgccgaccgcaagcagaccatcacggttccaggcaccaacctgctcaggatgggcgacaagctggtggtgaccaagaccggcgcgccgccgtactcgccgcagaacatcatggttgatcaggcggttaacaccggagcggtgctcggaaagcccggtctgaatcagtacgtcctgtacgcgacaggcatccgggcgccggacatcgaggagccgacggtgcgcatcatgggcgtgaacatcgacgccggcatcaaggtggacggctacggcctgccagccgtgagcttgaagctgcgcaagctgacggtggacgaatggcccgacgctgaagtgttccagccatccaagccgcgtctcacgccgcacaccatctgggcggtgaaggaggcacccgagcaggccaagcagaaccatccagccggtaacctgcactatgtaggggaaacgctggtttatccgccgggtgagcgattcggctcggcgcgcatcagcacctacctgggcatcctcaagcctttcccgctgggcgacgtgtcgaagatgggtgagcatgcgatctacctgaagcgtcgctacctggagccgcggggtctgcaggcgtatcgcatgggttgggcgatcgtgggtgatggcactcagttcgtgacacagttcgccggtgctgattcgatgttactcggggtgcctgccgtagaccgtggcctctattacggcccgcaaacagttcggcctgctggtctgccggctcctggcccgggtggggctacatgggtatcgctgctggatcgtcgactccagatgaccggattcccgtcgcaggctatgggatattcgcgtggagaaggtccgtaccagtggcagtcgctgcatgttggaccgccgatgccgaccattccaagcggtaccgacacatcagcattcggtacagtctgggtttcgctgcgggtgcgaggggttgagccggacggttgggagtcgttcatctgcgaatacgacccgtcgcatttcgcggatcgcatgcgagtccgcaacgtcttcaccccaccgggtccaaatgcccagtccgtggcacctgtagggttggattcagtggatgtgggcgtgcccaatgtgcggccaggtgtccactacatccgccctgacggcaacgccgatcagtaccgcaaaggagctttctgatggccacgacttccctggtgccgctggccggcatcaacaacgtcgccgaagatgccgcgctgcaacgcggcggcgagagcccgaggctctatgtgcgtgatgcggtgaacatagacctgtcgccggccggcaaggcgcaactgcgggcctctgtgcgccaggtcacggaccagccgttccgccaactctggcaaagcccactgcacggcgacgccttcggcgccctgggcgaccagtggggaaaggtcgatccgcattcatggacgttcgagccgctcgcacagatcggcgaaggggacctgtcccacgaggtgctgaacaatcgggtgtgcgtcgccggaacggcgggcatcttcacctacgatggcgcgcaggccgagcgcctgacgctggacaccccggcgccgccgctgctggtggcaggcgccggatcgttgagtcaaggcacctacggcgcggctgtggcgtggctgcgcggcccccaggagtcggcgccgtcgctgatcgccttcgcggacgtgaccgatgccggcgcgctggaagtcacctttccgctgtgcttggatgccagtgtgaccggcgcgcgcctctacctgacgcgagcgaatggtggcgagctgctgttggccggcgactacccgctgggcgcggccacggtcatcctgccgacgctaccggagctgggccgaccggcgcagtttcgccacctgtcgcccatgccgaccggcaagcacctggcctactggcgcgggcgtctgctgatcgcgcgcgccaacgtgctgcgcttctccgaggccctggcctaccacctgcacgatgagcgctacggcttcgtgcagatgccccagcgcataaccttcgtgcagccggtggatggcggcatttgggtgggccaggtcgatcatgtcgcctttctggatggcgctgatccggcaagcctgagcgtgtcgcgtcgtgcatcgcgggctccggtgcctggtagtgcagtcctggtccctgccgaggtggtaggcaccaacgcatcaccggatggctcgccggtcgccgtgtggctagcggagaacggctacgtcatgggcaccagcagtggcgccatcgccgaggttcatgcaggcgtgctcgccggcatcaccggccgtgccggtacctctgtagtgttcgaccgccgtctactgacggcagtaagctgaatcaccccgaatatcgggccttcaatcgctgcgcaggagtgcggcatgggacttcggagagaaccctatgcaacgcattagcagcgctctgcgcaaagaaatggccgccgacctggccactggtagcttcgacatcaccgaaaacggcattgccttcccgcggctcagcgtactggccggtggcgagtacttcggccgcatcaacagcggcgagtgggagaaggagggcgacaacctgatccccaccgagggcctggcgcacatcctcaacatcgcgctgggcagtaagcccaaggtgtcgtatttcctggccctgttcgctgggacggcagcacctgctgctaactggaccgctgctaacttcgccgcggtggcctcggagatcaccagcatgaccgagggttacaccagcgctacccgcccagtttggacgccgaccgacaccgctaccgggtccatcgacaacatgaacaccgtggcgaccgtaaccatcgccacagcgtcgcagctcaacgtcaacggcgccgcgctgctgaccaacagcaccaagggtggcaccacgggtgcgctggtatcggcgtcgaagtacgcggcgactcgtgtgttccagaacggcgatacctacgatatcggctaccggctgaaccttaccgtctaagccgatgtattcgccgcgcccctacggacgtttcgcggaagacgcggaactctccgccgacgatgccgccgctgtcgagcggctggccaggagcctgacgaacttcaagcaggcgtctgagctggccagcctgaagcgcgttgcggatctgcccagcggtcggcaggcggtggccatcgacatgggcggggtgtttcgcatcctggtgctcgagcagcatgagcttccgcaattccgtttcgacggtgtggcacagaccaacatccccatgctgttctccggcgtcatcacccgcgcccaggtgctgaccgatgggcagggcgttggcataaggttgaccgagcaggcccggcgccggctggtggcctacgacccgaaagcggcgcttccgccgaaggacgtggcgttgcaacgctttgtcatcaagtacgaaccgcgtttccaatacttcgagccgcgcgagcagggcatctacaccttcactcagtacgtcaagcagcgccctacctggtacagcggcgccatggccgaggtcatgcaggtggctggcggatatgggcggcaggtcatggccgaactgccagaggacgaccttgagcgcgcaaggatgctgattcctgagcgttacatgcaccgcatccgccaggaagtcggcaacgttcggctgccggcctacacaggctttccggacgagcaaggccagttcaaatgtgactacctcgccagccgctgcaacgccgtcgctttcgatgccggcaacagtccgtggttgctgcagatcaatgcgcggggcgtctacgcaatgccgcttcctgtggtgccggccaccaccaccgaggctttccgtgactacgtgctggatgttggtgacgacgagctgctgaagcttctggaccgcttcggcggcatgcctactggtgaggggttcccacagccggaacaggagttcgaggcgtggcgccgggccggcgtcatcgtcaaggtctgcgacaccgccgacttctacaatttcgaggccatgtacgcggcgtgtggctgggcggtgaacagccgaggcaccgagggcttcaacacctgctggacctatgacgacgccggcctgatgcaggtccatgcgtacaagatgagtctgtcgctggccccggcggagaaccaggggcgactgaagaacacctggaatttcgatgatccagacgatgcagcgaaactcaacgcctacctggcccaggtctatggcgcgctgaccgatggctccgccagagaactggccatcaagtataagattcggcgggtgccggctggtgagattctctcgcgcgcctcttcggccagcggcccggatctggactactgggacagcctggaactacctcccatcgccacccaccagggccgtgtgtcgcgcgtcgccagtggccctttctactggccgtccaaggtcttaaagtcctgcacccgcctgaagttccccgaactgacggggcaggggtgcgagtccttcccgcacatctcgcccgactattccggcggcgcagtgaagtgcgacaccatagtcttcggctgctatgtcgaggaccaattgcgtgtcatcaagtatttctacgacgaacgcaagttccagcaggaaacgacaagtacgttcgagcagtacatgatcgtcggccagtgggagaagaccgagaccttcggccttagcgggctgatggggttcttctacacgaccgacttcgacgatcggcaggagcagccggcggtaacggtccataccaacatcgtcggcaccgacatgggctacggcaacccggcttactccactccgccgacactttggtgcgtcggcggcgtgagccggtccaggtattacatgcatcgcaccacggtagacactaccgagacgtttaccctggacgtggcggcgctggtgccggtgttcgagcgcgattgcatgctctacgcctaccaggaccataccgggggacgcagttcccacgaggaaacgacgcagggctctgtgcctgatcccacatcctacgaactctggtgctacgacgacatctggcactggatggggcagacgcggaacgggaaccggggcgacccgccatccaaggatggggtgccggtctatgtcgatacgctggtctacagcccaaccgaaatcagcgacttcgccgaaagcggcaactggctgaacctgccacctggcggttttttggatgtcacgggcatctgtgggccgtacacctaccgcaactccgtccacaacgccaacggcgtcattatcggcggcgaggcgccaggcttcgatccgtaccggaaggacacccagtactccaacgagagtagcgggcgcctgagtgtgtgcctgtccgtggccggcgctgttcaggtcaataaggacatgccgcactcgtggtactggggcttctcacccgagaacgacttttacttctaccgcgacgccgtgcatgtcgccatcggcgacgcccggtacgccagcatctacgagacgggccaggatggactgcgccgccgctgggggcataccgcgctcgccgatcacaaggcggcccaccacttcataggggttatcaatgagtgactaccgcgacgactccaacgacacggcggtaatcagcgacacgacctggctggggttgtcggccgtcagcgaaggcaccgcgcgcatcagcgagacggtgctgtacgggctgctggtgctacacatcgatacggcggcggtgtcggatgaggctatcgaccgaccggcgcacctgctggcggatcaggcaaccatcagcgacgcggcgagcgaccagctccgcgccagggtgctggtggtcgatacggccaccgcggcggatcgcgtcaccggcacccttcgtgtcctgcacgtcgatgacgccctggtgtcggatggggtgctggatcgcgtgcgcggcctgacggtggacggtgccacggtggccgacgaagcattcggcacccgtcatgcgttcaccctggtgctggatgccgcgcgcatcagcgacagcactggccaggccgccagtgtcctggtcgaggacgccgccaccgtcagcgatcaggcaactggggcgctgcacggtcgcgtactgctggtggatggggcgtccctcgccgaggaggtggtggacgcgcatcaggccgtgcaggcgctgctggtggacggggcatccattgccgcgctggtgctggaccatctggcggcgcgcgacctggtatcggatgccgtggtgatcgaggacatcaccgtggggggcgaccaggacggcggccaggcttggaccgcaaacgtcgatagttgggcgatgagccgctacgcgccgtataccttccggtcgcttgctgtgatcgacggtcggctgtacggcatcgccgaagacggcgtttatgcgctggacggtgacagccagccggtggccggcagaatcgcgaccgggaaactggacatcggccagggcgcgctggtgcatccgcatagcgcctatctggagtatgcactggatgctgatggcacggtggccatggacgtgaccaccacgcaaagcggcagcgcagcgacctacagctacccgctggagagcgagcctgcaagcgagttgaccaatgggcgcttcaagttcggccggggcctgcgcggcaggcacttcaccttcacgctgcgcctgaccggccggcacggctatatcaatgacctgagcgtcgaatcggcgccgaccaacaggagagtgtgaatgggtatcgcaccggatagcatccttggcgttgcggtggacaccgttacggacaagatgaatgaccttgaggcgctgggcagcaagtacagcgcagagctgtctgccgcgctggcgaagatcggcgacatcacggtggctgacgtgccggcgccgacgcgaccggatgcgcctatcgcttcgccgccgcccgtcaacctcggcgagcagccgacctttaacccttcgtccctggtcaagccggaagcccctgggggcttgaacatcgacgacttgctggccgacctggacgtgggcgacatggacgacctacccgacgcgccgacaatgattccgatcaacatcccggacgcgccgaccatgacggccatcccggtgccggaacgcccggacatcgacaccacggtggagattcccgatgcgccgcagatcgtcatgccggacatggaagcgctggaacagatccgactgccggaattcgtgttccccgagttgcccacgttcgacgccacgccgccggacgcgagcgggatcacggtgcccaacgtcttcatcaactggctggagccggagtaccagtccgaggtgctggacgagttgcaagcgaagatcaaggaactgatggcgggcggcaccggactgccggcgcccatcgagcaggcgctgttcgcccgtgcccgcgaacgcgacagtggcgaaaccacccgcgccgtgcaggaggcggtcgatacttgggccgcccgcaatttctccatgccgccggggatgctcgccaggcaggtagatgtggtgcgcgagcaaggccggctgaaggcggccgaactgaaccgcgacatcctggtgcaagcggccacctgggaaatcgagaacctgcgcttcgccgtgcagcagggcctggccctcgagcagttgaccgagaacatgcaccagaacatggcgcagcgcctgttcgaggtcgcccgcttccacgcggaaagccagatcaacgtgttcaatgcgcagatcagcctgttcaacgcgcagaacgcggccttcgagacgctggcgcaggtctaccgcaccaagctggatgcggctatctccaagctgactgcctacaagacggccgtggagggccaggtggcgctggggcagatcaaccagcagcgcgtcgaggtgttcaaggccaagctggatgccgtacagtcgagcgtcgaggtctacaaggcgctaatgcagggcgcttccgtacgcgccgagacgatcaagaatcagttcgacgcctaccgcgcggacgtgcaggcgtatgccgagcagatcggcgccgagaaggtcaagttcgacgcctacgaggcccgcgtcaagggcgagtcggccaaggcggacgtgctcgatgcgcaggcccgcgcctacgcttcgaccatccaggggctggcgaacaaggccgatgtcaaggtcaagggcgctcagattaagatggaggcggcgcgtaccaaagtgtcgaagttcctagcggacgtggacgcctataaggccaccctgcaggccaacctgagcgaggtgcagtacaacacgtcggtgtttcaggcccaggtagaagcctggcgcgcagcggccagtgccaacgtggccgacgccgagatgcaatcgcgctttgccgacatgaacagccggaccaacatcgcatacgcggaaatgcagatcagcgagtacaccgcgaagatgcagaacgctgtgcaacaggcgcagatcgcactggaggcagccaaggccctggggcagtacaccgcccagctcgcggccggcgccatgtcggcggcacatgtgtcggccagcatcagcggaaccggaagtgccagtactcaggaaagcaagagcgaaagcacgcagaccagttacaactacagctattgatggctaggatctgacttgggatatattcagcgctttcattgtgtccacggctataaggaagagtcatgcacagtgttgtcgctaggcttttgggggcagtaattgcgctgtttaccccaatattggtttttgcagacaaatacggggttgatgagtcgattcgcgaaagctcggggaacctagagttaagagacgtagttgtcggggctattataatttttggtcttatctggatttggaagaagatcaccgggtaaacacatagccaaacgctccgccccccgtagggttagctccgaagcggcctggaccggaatattgaaccggtatccaggccgtttctttaggggcttcacatgtacgggttcaagaagggcgccaagcccaagcaacgatttgcagatggtgggcgggtgcgtggtccaggctctggcacctccgacgacatcgacaccgaggtgcctgcgggcagctacatcatgccggccgattcgaccgagcagattggggaagcggcgttgcagggtatgggggcgccggtcccggtcagcctgagtaacggcgagtaccagatgcctcccgagcaggttcatgccgttggcgtgcaggcgctggacgccgtgaaggatgccactcatgtgccggtagcccagcaggcaaaagggttctctccgcgtaaaaggggagagaatggcgccgagaagccggaattgttcttcgccgacggcggggttgtcgatgaagagcgcaaaaagcagacccgtttcgacatcaccaacacgcccgccgcccagcgtgctgctggcgctgtgccggaggcatcggctcccgtagccaccagcggctacagtgcagaccccaccatggcaaaggcgcaggccaatatcgatgctgaacggcaagcgatggctgtacatcgccagcgcactgctgatgccgcaagtcttcagccgggagtggcaccaggctacagcgacaacctctataccgccaacgcccaggcacgttcggatgcggcacggcagcaacaggccgtggcacaggccggacaactgccggatgcgccgtcggcgcaaggcttctcgccctcgcgacaaggtaatgacccggccagagcggcaaggatgcaggctcagtttgatcaaccggtgacgggccctgatcgatccaaagcggctggtttcactccgcagtaccgtaccgagggtccaggctggcgaaccgactcggttctccgcgggacgggtgacgacgtagcgcagcagtgggcatcgggtgagtatgcccgcggcttcgggactggcgtgcgtggggcgcttgcggcggttcccgcagcattcgctgatgctggagaggatgtcggtcgattggcggaaccggtggtcaacttcggtaaagggctattcggatgggatgacactccgccggcgcttcgtggtcagcaagcagcccagggtgcagcggcgccaagttccagtgctgcgtccgggcgaggccaggtgttgccggctgctggtgcgccaaccggagcgctggagtcggcggcgaatactggagctgctatgccaagcgccggtggctcggacctgcccaacaacgtgacacgggtgggcaacagcttctccggcacaacaatccgcccgggctacaccgttaacggggaagctcaagctacggggttcgccccaggtggtcagcggagtgcccaaaaccagcgcgcagtggagaacctgctggcccgaacgcctgatgtgggtatggggttcaggccgagttctgtctcccaggtaccgccgatggccccggacgcgttggctcagtacaacgccggtaactccggcgcgcctcgggtaaccgtggttcccgatagctctcgcgccgatagcgttcgccaggccgccttgaatgcagcctcaacaccttatcgcggttcgccgaacgggcagttaactgcccgccagatcgacaacctgttcgggctccagcagagcgatgaccgcaatgctacgtccctggcgagcactcgggcgaataacgacacggccttggtgcgggagcaggtgcaacagcagggcgcaaatcagcgcgcggctctacaggaaatggggcagggcgcgcgcttcctcgccgccaacgaactcgatcgccagcgcctggctggtgagcaagaggccaggggtttccaaacccgcgccgcccagcgcatcgagaagctgtacgagcagtacgacaaggctgctcccgaagaccgcgccgcgatcgccgaacagattcgtgtgcttgctggtaaggacgctccgaatcgcttcaccgtggtacctggcggccaggagtacgacccgcagtccatgcaacttctgacgcgccctgcacgagtactcaacaaccagaccggccaatttatcgaccagcaaacgcagtcggcgcaacccgtcgctccgcgaactggtgaggtgcgaagtggataccggttcaagggagggaaccctgccgaccagaataattgggagaaggtgtaatggccgataccagcaagccatgggaagagttcgcgtctcaacagacagtaactggtggcgagaagccgtgggaggagttcggtggcgagacgaaggaggagggaagaggcctgatcgggcatgcgcgcgaccttggcctatccgtggccaagggggtgattggggttccggaagcggctgttggcctcgctgatatcccaacagagggccgcgtaggtaagttcctcgagaatcaggacggcatgctcggtttccggccccgggaggcgaaggatttcctgagtgatctacacaccgatcagtacaaacagcaacagcaggactttcaggatgctgatggcgtcgtagacaagacgctgcatgctgtacagaacccgtcgatggtcgtgaacaccgtagcggagtctttgccttccatgttggccgggggcgcggtcggtcgtggcgttcgggcgctggctccagcgttggcacctgtggcagccggcgcggctggcgaaggggcggtgatggctggtcagcaagcagagcagatccgccaagaaactgatgacggcttgctcactccggcgcagtcgggagccgcggtggccactggtgtgttgggaagcctgttttcccttgccggcggtagcttggccaagaaactgggcatcggtgatgcggacaccctcctcgctggtggtgccaacccaggacaactggccggcgaactggcgtccatgccggcgaagagcattccgcggaaggtgatagagggcgcaatctccgagggcttccttgaggaactgccacagtccgcatctgagcaggttctgcaaaacctggcgctggggcgggactgggcgagcggcctggatgaagcgatggtaatgggaacgctggccgggatggctatgggcgggccggcggcggttctgcatggcggtcagccggccgcatcccgtggcttgacggatgcggacgccaccttcgagagtaccccagtccttgaggggcagaccgaggcaactgcgccactggcactcccagctccagtgtatgaggctggttctgacggccaggtccggaccacggtcgaccagaactccgctacccaggtacagcgtcagcaagaggctgaacgtctggaccgaatccgtcgaggggaagtcaccgatttgactccggtcccggcggccccaaagcgctccgagcagatggggctggacccggctactgggccactttctggtgctgctgcgcaggccgtggacagtggcgcaactgaccagatggtgcaacaagccgcgctccagcaggcagccgaggcagcgaagaaaggcgacaaggccaaggacgcgcagcccgacgaggccatgctgaacaacgcccttgacgcggagattgagctgcaaggtcaggtgcaagacgacatgttccgcgccggcatcaacccggaaaccggcgagattgacaacgcccacatggcgcgcctgaacaccgagcgcgagacggatctgcgtggccgactggactacgtgcagcagatcgcgcgcgccaacggctgggattcgcgcctgatcgccgagcgcgaccggctccagggcgagttagccaagctgcaaccgcagcagcaggagcagggcgccgctggcctggccgacttgggcggcgccggtaaggccattgccgacaacctgtacagcagcctgtgggatcgcgtgcaggaaggtaagaccagcgagaaggacggaatgccggaaagcgcgctgctccagggcgccaagatgctgaaggacgccggcagcctgcgcacgccggaacagttccgcgaagtggcaccgctgattcagaaggcctccgacatgcaaggccccgagcgaagcgctgctatccgccaggtgctgagcgactggcatgccgccaacacgccgcagcaggctgcgcctgccaatgtgcagcatggcatccagcaagcccaggccaagcagacccaggagaacgcgaatgcaggtgaagctcaacgcccggcagaagcgcaagcagcacaaccgcttgcacaagctccggcgccagcgcaacccgcaccggccgcgcctgcacctgcggtagaacctgcgaccgaggcgaagccgagcaacctgaaggacgccatcgccaaagtgcgccagaacaaggcttcggcgaagcctgaagacggcggtgcggttaagcaagagccgtcgccaggcgtggacaggcgctacctggacgatgacagcaacgtcaacccgcaggcgcgcgcatacaccatcccgaccgtacaggccatgagggaggctattaacctggtagggaaggatcagttcgagcgattggccgctgaccgtggagagcgccgccccactgaccgctgggaggcggctggcgccgctcgcgtggagatggtcgcgcgcaagattgttgactatcacgacaaggagcgcgtcctggccgcgccaggtatcgagggccgcgatctgggcgaaggctgggccgagttcaacaaggaatccggcagcgtgggcatcccgcgcgccgacatgccgcagatcaaggccgagcatcgcggtgccatggtcaacttcctgcacgctcgtggcgtgcagcaccaggaagaaaccgtgccggccgacagcctgaagccgacgcaggccgaattcagccgcgacaaggtggccaaggccaagggcttcgaaggtggcaaccgctccattctggtgtcgcgtgacggccatgtgctggacggccatcaccagtggatggcggcccgcgacaacggcgaagaggtgaaggtgatccgcctggatgcccccatccgcgacctggtgaaactggcccacgaatttcccagttccaccaccgatgccagcagcgggcagggtgccacggttgaagcgaagcaggtgaggcccgagcctgagccagcaactcctgatgtgcctaagaagaagccgcgcggcgtgctggcaaagaggttacaggccgaggcccaggcccgcgccgaatacttcacccccggcaacgtggtgcgaggttacggcgccaactacgacagggttatcagctacaacccgaccgaatcgggaagctggaccgtcacggtgcgcagtgtacgcaaggaaggcgacacctgggtggatgtcccgggcgagagcgagcgcactcacatgacggcgccggatgcgcgcgacatgaagcgcggcccggccggccgtatcgcaacacagggggcgccaaccgccgatgagttccccttgaaggaagccgcagccagctactccggtatctcgaacagcagcagccagcgagcgaagtccgatgcggatgagttccagacctacatcgacgtggcccgcgacgcgggcgctgtcgtggcacgcaccgatgctcagcaggcggccgtggagcaagccacacgagaattgcgggccgattacctggcccagtaccggcgcctgatgaacgtgcgcgccggcacctacagcggctatgttgtcgggcgttctggactgaacagcaagcaggcggacaggcgcaacagcgcctacgaccgcgccatcgacacattcgtggcctggcagaaggccaatcaggaccgcgtgcgccaggcggccctggacgcccgtaccgacgaggaaaaggcggcagatcgccaggccgccgagcaggcccgcgccgacaaggcgcagcgcaaggaagacggggaccgcagcctgatgcgcaggattctgtcctggaagaagggcagcgagccggtggcgatcaccaagaccgcgcaccttgccggggtgaacttcggcaaggatggctacccgaccagcattaagttgacgccgaccgatggcagcgtgctgaccagcgacaagttcgacctggcgacgctgttccgtgagcgcggcatgagcgtgccggagtcgaaacgccgcgtgcgtgaactggtcgatttcgtgcgcgccgaggatgcagcccggccccagtccgaaccggcagaggcacccaagcccgatcccgcgcagcccagcgattcgaaaaccccgacgctcgatgagcatgtagccctcatgcagcgcgcgcgcagtggggaggcgaccgccgacgagttccgccaggcattcgagcgtacgcagaacgcccgcgacgccctggtggccgagctgggcactatgaagaaggatgaactgctgaagtcaggcggctacagcttcttccaccgctaccgcaacgagaagaaggcagcgattgtcgatgccctggccggtcgtgtgttggaggaatttgcgctgggccgcagctacggcccgagcagctacgtgatgtcggctgcaggcctcgaagcgcaccgccaggccaaggccagcgcgctggccgagctggtggcgaacaccaccgacgacgacatcaaggcgcacgctgccgaggtcgccgaggcgcagcaggaagtccaggcccgccgggcagcgcagcagaaggctgtcgccaacccgcagaccctcgccgagttccgccaggcagtgagctacaacatggagatgcacggggagtccctgcgggaggcgttcatgcgcctgacgccggaacagcgtattcgctacgacgaactggaggctgagagcaccaaggccctgcgtgagcaggccaaggcacaggccaagacccgcgtagccagcgccgggcagactacggccggcgacatcatcgagacgaagcacaccaagcacgggcatgacctgttcgtggtccaactggccgagcgcgtcagccgcgaggactacggcaccctgaacaattcggcgaagcggctgggcggcagctacagcagttaccgtgggaatggtgccgtccccggcttccagttccgcacccgcgaggcggccgaagcattccgcaagctggtgaccggcgacaccgccgacgcgcaggccgttgcagaagcgcgccgcgacgccttcgaggatgaccgcagccagagcgccgcccagcggctgcgcaccatggcccaggctctcaacgagcgggccgatgactccctgagccgcgtacgcaagcagaacaccgatcgccgtgcgcgaatggccgccagtgccgaagcctcggcgcgcgccgacaaggcactggccgccaccatgaacaacctggctgccgtcatcgagggcggcaaggccaagttcctggacaccgtgcggcagaaagtgcaagtggagttcctgacgcgggagctgcgcaatgcgaaggacgcgcagattcgtgcgaagtacccgacttacggcgagcaggagaaacaccgcggcgagccggtggacgccgagacggtggactactccaccttccccagttacaccgccatgcgctccgacctagcgagcctggcgcgccagatggcggacgtggacggcctgaagaaactggccgcgcgcctggagaaggtcgccgacgacgtgaccgaggcctacaccgactgggccaagcagaaccttctgtccgtcagccgcttcacccgcggtgaccagttcgccgacttcaagagccgcgaggatgccgagcgtgccattcgccgctccggcctcaccggcaaggccatcgtgcttcaggtgaaacgcgggcagaaccgcatcgtcatggctcccagcgaagccatgaagctgggactctggcagggcgacggcgacaagcgcatcacgctgtccggcgagttcggcagcgaactggtgcaggccctgggccggcgcagcggcagcaagatcaccattccgtgggcgctggagagtgcgcacgaaaagcgcaagcgcctggagagcatgggcatcctcaccggcagcgagtaccgctccgcactgcgcgagttcgcggcgctgcgcgaggcgcccaccgagccggataagatcaagcagatggaacgggcgatgatcggtcgtcgcaatgacggcctggacttcttcccaacctcggccgccgtcaccgaggaagccatcgacgccgccgacatccagggaggcatggacgtgctggagccttccgccggcatgggccatatggccgacgcgatccgcgagcagaccggcgtggagcccgatgtggtggagctttccagcgaacgccgcgaattgctggaggccaagggctacaacgtggtcggctccgacttcatgaacgtgtccagcaagcagtacgaccgcatcgtgatgaacccgccattctccaaggggcgcgacatccagcacgtacagcacgcctacagcctgctgaagcccggcggccgcctggttgccatcatgggcgaaggcgccttcttccagagcaacaaggccgccgagaacttccgagcctggctggacggcctgggtgccaccagtgaacggctgccggaaggttcgtttatggacccggcgctacccgtcaataccggcgtgaacgcgcgcatggtggtgattgacaagccggcagccgaagagtcggcagcgccgcagcccggcgaacaaccgcccgtgcagtactcgttcgccggccgcaatgccgtcggcgccaacctgcatgccctgagcaccgcacagcagcgcatcgccattggcgaaaacgccgaggccgttcgccgagataccggttggcaccgtagtgctgatggcaagtggcgcttcgaaatcagcgatcatcaggccagcatcgccgtggccggtgagactgctggcgccatcatcaatatggcccacctcaatgccatcaacgacgagcgcagtcgaccgaccgtcggcgatgtgctcagccatcctcaactgttcgctgcatatcctgacctgcagcgtatcccggtggcagtgatgccagagggcgtcactgcgctggctcgcctacgccggttcgccactggtaaccaagttgaggttcaggcgaacatgccgcgcaccgaggttgcctcggcgatcctgcacgaactccagcatgcgatacagatccgggaaggtttcgccatgggcggctcggccaggactttcgtcagcaacttcgacaagactggtgcggcgacctatcgtcgtttggctggagaggtggaggcgcgcaacacgcaggctcggctgaaaatgacgccgcgcctgcgccgggacattgcacccgatgagtcggcggacatccctgcaagtcaggtgctggtgtcgttcaatggccgcgacatcgagaatggccctttgccgcagaacctgacggggcgtccgccgatgacctcgcaaagcctggtgcgtgctttcgacctgcagttccctgccctgggccaggctgtgcgcaagatgctgaagcgcggcaaggaaggacaacggggcggcttggtggtgatcgacagcgccgacccgttgcgcatcgcgcacacctacgcgcggaaatccggtaccgcactgagcgatgccgttcaactgtttgaagatggcgggcgcatcaatggcttctacgatgccagatcaggtctaacttttctggtcggcccgaacctgaatccggtaaccgcaccggccgtggtgcttcacgaaatggttcacggccagcagcggcagaatctcgaccaggctgcccacgccatgctgatgaatcgtggcaacgtgcggagcgccgaactgcgcaccttcctggaccgtgtggccagccgcatgatcgaggccggcgagagccgcaacatgaaggaggccgctccgtatatcgtggagcaggctgttattgaagggcgagatcaggggttcgccgaggctgatagccggttcctgtcctgggtagacagtgcgctgggcaagcaggtgggtgacttcctgcgtaggttcctggccaacatccgtcagtggatgctgcgccacggtctgccggttggccgtatcagcgtggacgatctggtgcgatatgcgatggctggtgtggaaagcgccgccgaaggccgggtacggggcgacggcctagccatgagccaggacgacatgcgcaaggcgcgcgtgctgcaaggcccgccggtggccatcctggaggggaatgaagcaccacagggcttcgctgcggttcgcgagtgggcggcgaagctattcgagtctcaaggtggcaaggcagtgaacccggacctgggcgacgtggtgctggatatgcgcgctgtgcgcgactcgatggcgcatggcaaggccaacccatacaagttctcggcgttcgcggccgtcaaggacgtgctggagcgtggtgtggtggttcaccgcgcggactatgagaagggggagagtttctacgtatcggcgccggtggtgatcgacgataaggatgacatcgtgactgtgttggtgcgccgcgatccgaacatgcagcgcatgtatctgcattcggtggccacaaaagaatatctcctgaaccgtcgagtatccggtgctgatgccacgatggcagcgcagccttccggctcgtccagttcaggagacgtagccagtgtactccagcggctgctgaccgcaagcctgaatgaacccgaaggtccgcagttcagtcgctccggtctgcgcgaactcaccagcaaggctaccgccgaactgaacaagaccttcagcgctccgggaggcctgtcctggtggcacaagaccatcggcaccatgtacaacctcgcagagcgttccccggcattcaaaccggtcttcgagtcggcgcaaggatttatcgatgacgtgagttattacgccagcgatgcggctgatctggcgccgaaactgctgccgaagctggaaacctggcgcgacatcgcaaagtccccggtgggcgctgaggacaacaaggcggtggccaagccggtattcgagggcacgctgatgtgggcgcgcgacgtggacggcaagccggtgcgcgtcgattcgctggctgagcgcgccatgcgtctgacggccgacgagaaggcggacatcctgctgaagcagggcaagattcccgagggactgcttcgcgcatggcgcggcctgagccccgagcagttcgccaagacgatcgacagccgctacgagtcgcagatgctcaaggcaggcatcgtctggaccgacgctgagctgcgcgacatatggaagctcaacgatgctcaggtcgcgctgtaccgcgagttccgcgccgccaccgaccgtagcctggacaccatggcccgcgccgacatgctgcgcttcggcggcgaggatgtgaaggaactgcgcgaccaggtgatggacgcggccgatgcgcaggagggcgccgcgatactgcgcgaccacctggcgcagatggctgatgcatggccggaacgcgccacgaacctgctgaacctggcacacggcatgacggatcgcgccgagaaggtcgcccagttgcagggcgagggctatgcaccgctgtcgcgcttcggcaagtacaccgtggatgtggtggacgcgaacggcgagcgccagtatttcagcctgttcgagaccaagcgcgaggcgaacctgatggccgagcagatgcgcggcgccttccctggcgccaccgtcagccagggcacgctgtccgaggaaagctacaagctgttcgccggcatcaccccggaaaccctggaactgttcggcaacgccctgggcttcgactcggagggcgacagcgcccgcgaccaggcgttccaggaatacctgcgcctgaccaagaccaaccgttccgcgatgcgccggttgatccaccgcaagggcatcgccggctacagcgaggacgtgggccgcgtgttggcatcgttcatctactccaactcccggcagaccgccgctggcctgcacatgggcaacctttccgaggctgtgaacggcatcccacaggcgcagggcgaactgaaggacgccgcggtacggctggccgactacatcaagaacccgcaagaggaggggcaggcggtgcgcggactgctgtttgcgcagtacctcggcgggtccgtcgcgtcagccttcgtcaacatgacccagccggtccaagtgacttttccctggcttagtcagtatggcggggtgaagcgcgctgcggcggaactggggcgggcagcacgacagatggcgcagcgctcctatcagttcgaaccggacctggcccgggcattaaagcgcgcagaggatgatggggtggtgtccccgcaagaggtccaccagttgatggcgcaggcccgcggcagcggctcgctgcgcgccggggacgggacgcgcttgggtgatgctcgagcacttgcgtccaacagcgtggcgcgcctgtcgatggcctggggcaagttgttcggcgccgcagagcagatcaaccgccgcatgacttacatcgcgtcgtatcgcatcgccaaagcgcagaacatggccaatcctgacgagttcgcgcgccgggccgtgcgcgagacgcagttcgtatactccaaggccagcaagatgcgctgggggcgtggtgccgtcggcggcaccttgatgaccttcaagacgtacagcgtggcctatcttgagctgatgcatcgcttgtggaatcagggtgagcctggttcgcaggagcgcaaggacggtcggaaggctgctgccctgatgatcggcatgctgctgctcgtcggcggcgccggtggcttgccgttcgccgaagacgccgaagacctgatcgacggtgcggcgcaactcatgggctacaacttctctaccgcgaaggccaaacaggagtttctggaaggtctgtttggtcgggtgcttgccgacttcattgatcgcggggtgtccggactgcctggtgctccgctcgatgtctcgggccggctgggtatggggaatctgatacctggaacccggctacttcagcccgcccccgcgaatattcgcgatgtgcttgaaatagctggccccatgggggacttcgcgaatcgcatccttgagggtgggaaaaagatcgccagtggcgacatcggtagcgggttgctggaaatatccccgggggcggtacgaaacgctgccaagggtgtggatatgctcgccactgggatgtaccgagacacgaagggctacaaggtcttggataccaacacgcttgaggccgcgatgaagatgatcggtttccagcctgccagtgtggcgaccattcaggaagccaacatgctcagtcagaaggcgaaggccttctacaacctgaaggcgcaagaaatccgcagtatgtgggcggccggcatcttcgagaaggaccagggcaaggttgagcgcgcgcggcaagcaatagccgattggaatcgacgaaaccctgaccagccaatggccatccgagtgccagacatcatgcgacgagtccgtgaaatgtcgctatcgaaggacgaacggatagcgaagaccgcaccgaaagcgatgcggcagcagatgcgagaggatctggagcgcacccgcgcaacgctggactgaaccccctgtaaggatttgccgttctctggctgtaccgaaaactacctgcccaagaagccggggcgtgatgccccggcctttggaggatggagttatgtcggagagggccggaatggcggtagaggtggtgggcgtttcggtggccaacaagaccacgctggctggcgcccttgcgggcgcgttgggctggctggcgcagatcaactgggtggggctgatcggcgtgctggtcgccgtcatcggtctgctggccaatatctatttccaggttcgccgcgaccgccgcgaatcagccgagagcgctgcccgcatcgaggccatccgggggcgttgcgatgtcgaacagccgtaaccgcgtgctggttgccgcgctgaccgtcagcctggccggcttcggcgcctggatgaagtcggaggatttcagcgcgaaaccatacgtgccgaccaagggcgacgttccgaccatcggttacggctccacccgctacgagaatggccaatcggtgaagctgaccgatccgccgatcacccgccagcgcggcgaacaactggcgcgcaacctgatggcgaaggacgaacagcagttccgcgactcgctgcccggcgtgaagctgttccaggaagagtatgacctgtacctggatttcacgggccagttcggcatcaccaactggcgcggtagctcgatgcgccgcgacttgctcgccggcaactaccggcaggcgtgcgacgacctgctgaagtggcgcaaccaggcaggccgcgactgctctctgccgaagaactgggggccgaagggctgcaaaggtgtgtggaccagacagcaggagcggcatgcgcaatgcatcgtcgtgcaggtgccggaatgaccgcccgcgaactgggcgccgtcctggctgcgatcgcgctggctggcctggtggccagcacgctgacctatcggcacctgtaccaggacgccaccgccaacctgaagtcgctgagcgaccaggtggagcggcagaacgccgagactgacgccaagctggccgagctgaccgcgcagcgcgacatgaaacaggcagcgctcaataaggccgctgccgaccaggagaggaaggacaacgatgctcaggctgaaatcgctcgccttgctggtgagctgcgcgaccgccctgtgcgcgtgcgcatcgtccccgccgcaggtgggggctgtagtggtggcgccgcaggtgacgcagccggcaccgccgaagctggtgcaggagacgccgcctcggcctacgggctactaccggaagaaaattctcgacgctttaacgactccctgagcgaagtcgaaaccctgagcgcggcctacaactcgtgtcgcgcccggttgattccccaagagccgaccccgtagggaggaaaccatggcctacaccgcatatcgggtgctcaaggcacctatcgaccagatcgagcgcttcatgaccgaggccatcgccgatggctggcagccgctcggtgtgcctatcctgctttaccccgacgacaaggccgtctaccaggctttggtcaagggcacgccggatggtagtggcaccggacctgtcaccatcgtggtggaggacatcgccgatgcttctgtcatcggcaaatctctgctgacggccgtcaacgaggaagacgggcgtgcagcaatcggggccggcacttctaatttgcagttgggcattaccgcaaccaccgccaaagcgggaaactatgcgcctgcctggggggatgtgacagggaaaccggctgttattgcggctggtgctgatgccgcaacagcaagggtggctattggcgcgggaacatccagccttgcgatcggtacaaccgctactaccgcagcggctggcaaccacaaccatgcaatcactgctgatgctgccagtgggctggctgctgcttccagccttcaagatgcgttcgtagcggtctcggcgcgggtcaaggctctggagtcggttgccccgtaggtgaatgcaatatgccatggatggcgcatttgaagggatagagccttgcgcaggcggaaggtgagggggacattaccgcattccacggagcttcaaccaaaggaacgatggccatgtacatcaaggtcgctattcgagccgcggcacctgtcgctgtagtgattctgctctctctgcctatgtccgcacctgcccaggtcttcaaatgcatcgacagcagcgggaaaataaccttttcagatcaagggtgtgcagcgggtcactcagcggccgcgatagacgttgcgccggcgaacacgctcgacagttcgcagtaccgaagtccgccgcctcaacctgagatgccatatcgcgttgcgccttcggcacggtctggcgttcaagtcaacgtcgtcgggggcgacaacgattcagagcgtgagcggaaaagactttgcaaagaggcatcgacgccctatcccggatctcgaggagggctgacctctgctcagcttgccgccgccgcgcagttgtgcgcgggtgtttcagtccctatacctgctacgcacgcgccggccggtggcagcgcaacgcgagcaccgacggtaccggcagcaccaggagtcctcaccagttgtgatgaaagtgggtgttgggacagcaacggggctaggtacaaccgaggcgctggaaatactcacttcccggcgagtggtgggccggcgtgcgagctcgttggtgggaacatggtgtgcccttgaagttgtagactacggccttttcctacggagctcggtgatgctggtgattcggctgaaaagcaagtggaccctgaagttggatcgccagataggtagttctggaaagcacggaatatgggcgttccactgctctgaaagcacgttcgcgccgtcttcgaacgacctccggcgcactgcggcggtccttccagccgagcccaaggagggccaggcagtggaagtgtcgatctgcgaaagcccgcactcgccggatggatggatcgccgtcggctcaggcgtagcagcctacgaagcggagcgctgaggctaactccgtctgggcatggatgttgagagctagctgttctgctagtggttgtggtgtttctggctttcgaaactgcgcgctcgaagcacggaaggaacgctatggatatcgaacggacgcacattcacagccagcacggcatcaacttcagcttggcgatcattcgtctcgcgtgggcggagcgcagccggctgcttcacatgaaatactgtccatcagcgaaggccagccatgcagtggctgatcttgcggttgagattttcgacaggatgcaggcgaaggatcgaccttgcgtactgagagtctttgtctcgctgcccttgacccgatctcaggctgactctctgaaccagcagcgtgtcaccgttgctggtatggttggtatgcttgcgggtgtcgccggtaaacgcatcaacacttttgttggggttggcagcggcctcgcagttcgttgggctactcagcagaccttgccgacctaccacgctggagacgtcattatcagcgttgaaggggaggtgtctggcgggatcgggccccagcattctgtcaagtcggagatcgtccagagtgctggagagcctgcatgaatgatgtcatccagttcgccatctggactgtagtcattgttgcggtcggtcacctagtgcgcaacagggaggtccgtaagtggcttgggatcgctgtgtttgttgcggcttgggtgcttattcttcgattctcctcggtcaagttggcaggctttggtcttgatatcttgggcatttgccttggcatccttggggttgaccttttttttcgacgggacaagttctcaaaagcagatgaatgatggcgcgcaggccgaccggaggctctagggcggccaccgccacggtcggaaatccgcgggtatttgctcgacgagttgcagcgtgccgccggcgtcgagttcgatcagcaggccgcgcacgacgcccgagcgctcaagcgcctggcccaggcgcagataggtcactccatccagtggatccaggctgatgcagcccagccgctgccgttccggtgcgggcccgtggtagatgccctcgtcgtccacgctcccgacgacgacaccggcgtcgagcacgttgtagcaacagtcggcgcagtagtgcgtctcgcgcgtgatgccgtgctcgatcgcccatgagtacatgccaagtgcatccgtgaccatatcgtggcggtcctgcaggtccatgattccgcactggtagagctcgtttgcctcgcccaccaggtacacgtactgctcatccgcggcgtacagccatgctgcgtgctgacgtatcgcagcgagccatcgtgtgacacgctcgtgctggcggcggcgggggtcggagtaggacatgggaatctccggcagtcgggtgggccggaaattatgctgtatgaatatacagtatatgtgactgaccgacgaatggatcggttcggggtcaccatgaaaacagtcccatgcaatagcagtttctgcgtgttaaaggtagaatttcgcagccaaaatgaaatagtacattgactagtacattttccttttgataaattcattttagctttacaaatcaaggtgttaggcgctcggttgggctctctccgtccgcaccatacttctctttcgcgatccttcgcgatccttcgcaagcgcagtaattccggggctttcagccgattagcctcttccgttggcttccgccacaattcgccaccagccgcgtttttttagtacattccttagtacatctgaatttggtttttccgggaatgtactatgccgctcacggatactgctgtccgccaggcaaaagcagaagctaaagactacaccctcgccgacattgacggcctctctctcttcgtttctcacaagggcaccaaaagttggcacttccgcttttcgctgaatggccagcagaagcgagtgtcgcttgggacgtatcccgagttgagcctgcgtgatgcccggcagcgccgtgacgaggcgcgttcgttggtggcccaaggcatcgatccgcgggggcagcatcgagcggaccggaagacggtcagcgtcgaggagacgtttcgacatgtggctgagcagtggctggagttgaaacaggggcgctgggcggacgatagccggaaaggcagcgcaaaccaggcgcgcagagtattggacaatgacctgtacccggccctggcgaatatgaagtttcgcgaaattcaccgtcgtgacctggctgcggttgtcggagccatcgagcgccggggagcgctgcacgtcgcggagaaggcgcggagttggttacgccagatcttccgcgttgggatcgcggccggattacgagaggacaaccctgcctcggacctggacattctggcgaaagaacagccgccgactgagcacaatccgattcttgcgcatgatggcgaagagcttccagcccttcttgtgaggctgcggtcttaccaagggtccgagatcacaaggatcgccgttcgtctgatgcttctgaccgcggtacgtacgatcgagcttcgaaaggctgcgccggcagacttcgatctagaaaaggggatatggactgtcccgcccggaagggtaaagcaattgcgcggtaaggtgcgcaaggacggggaagaggtgccgccgtatatcgtgccgctgtcgcggcaagcgattgaggaggttaggcggttgctgcagaagacgggcaaatacccgttcgcattcgctggtcgaaatgacccaacgaagatgatgagcgagaacaccatcaaccaggcgatcaagcgccttgggttcgacgggctgctgactggtcatgggttgcgagggactttctccactgcgctgcatgaaatgggctacgacacgacgttgatcgagggccagctctcccatgccgatcccaacaagacgcgggcggcatacaaccatgccgcgcacgtggagcgtcgaagggcgatgatgcaggactgggctgactacctggaccggttagagcaatccgccgcggagtgatcactccgcggc

SEQ ID NO: 25 - DNA, 61775 bp, Yuavirus EPa38
  source 1..61775: mol_type = genomic DNA; note = EPa38
ccgcttcgtccaggtctttcacagctgacctccgtgtagttccccgaggcgctgattcagccacgcgacctccttgggcaggagctgttcctggtggtccacgaggtagcgcaggcggcgcaactgttcctggttctcgttggacagcttcgccacgttgctttcgaggcgcttcagcttcgcgggtacgtccttggcgagttccgccatcagccggcactcctccccgaaggcgcggagggcgtcccgggacgcggccacggggtcgatgttgtccccgtagttgttgcccaggtactccgcgcaagcggctcccgccgtcccgatcagctggaggaggtgctgctggctcgcgcactggcccgggtcgatgtccgtggaggacttcaagccggggcgcttctggctgtacacgaggaccgtcacttggtacttgcgggggtcctccgggttgcgcccgaggcgggcctggacgccctggatggtagtggtcatgccggttctccttcgcacagggggttggctttccagaaggcgcgcagctcacggcccaggtagatgttcacgccgtcctggccctcgaagaagcccccggcccggaaggtcggcaccacggcgtcctgcgccccggcggcgatcccgtccgcggattgagcccagttcagggcttgatcggcggagtcgaaaccctgcgccgtgaagaagctgccggagtcgctgatgatgtagaacttgtccaactccatttccagaccgcttccggggtccaggaaggtttccacgtgctgcatcttcccggtcgggctccgtccccaggcgcggttgcggttcacgctcatcttgtagtccaccacggtctggaggtccacgttcagcttctccgcgacctgggcgagcatgatgaacacgtccgcgcactccttctggagttcctggaccaactcctggtccatgtccgcgaccgggacggcggcgacggtagcgaggcccgcgaccagctccgccacctccacgttcatccgcgcggcgacttccgcggggtgcttcgggccgaaggtgtcgtcagcccagcgggtgattgattcttgggtttccatattcagttggttctccgaggttcacaaacaatagtcttgcccaggggccgcgacggatcgcggcggcactccaggcgctcaaaccgggacgggtccggctttcctgcctccgccggtacggtgacgcggaccggcggggcgagacggggcgagaagctgccgacctgcgcccggcggaccgtctcctgggcagagtacagggggcgatcctccgcttgcgcctgcgtggcgagcggcagcaggacggccagggcgagggtcatcagtctcatgatcgggctccttcggttcggggtcagtgaagaaagtatagtcacggaccccgaagaagtaaagtggtcagtgcttcgaggccgtcatggactggaggaggtcgcccaaggaggggcgggcgtcctccgcctcgcgcttgctcaggaaggcgcagccgtggtcatccagatagctcgcgtccagttcccactcgcccaactcctccatcgggaggtccgcggcgttcatgagcaccggccaggcccggctcatctgctcctgggcgtcccgcccgagttcgttcagtcgctcctgaaactcgcgttccagctccgccttctgggcgtgggcttgttggtggatgccgtggacggcccgggcggcggtcagggcgtctccggtgagacggatggtggtcttgcggctcatagcggttctccggtaatctgttcgcccaaggacacgatggtgtccatcaggaagttctgcatggtgcgggtttcatcgtacagctggtggcggaggtggatgaactcctcaatcagcgtcccggccagcatcttggtccccatcatcaaggtgcgcttgctgatgtagattttgccctcgtgagcccggcccaggacctcctcgcccaggaactcgctgacaatgatcgggtactcctggacggcgaagcccagccgctcgcagaagcccgcggccttctccagccgggtccgttccagctcgctcaggcgcatcggggtcgcctcctcgtggagctggtccatgatccagacctgcgaagccttcagcgcggagcgggacagcgaggagtcgaagctgcgggcgagttcggagacggtcgccaggaagggcttggacggctccacgccctcgaactccagcgcatgctcgaaggtcgccttgggcgcggtgacggccttcttgatcaggggagcctgttgggactcgcagagcccgcgacggacggcggcgctgatgtcccaggaccacttgatggtccgatcctccgtcaggtccaccttcttctggatgttgtaggtgaactgcgaggggttgtccagccggtaggctcgcacgccccggtagtacacgaagtgcgacggaccgggatggatgtggacggcctcgtggcgctccagcggttcggaggacaggatgatgtcggagcgggacgcccagacatccaggaacttctcgccccggaccacaatcacggtttcgtccgcggcgacctccgggacctcatcggcctcgaacacctcgccgcgttcgtccatcgtgttgcaatacagctcgcggaaggcttgccacacttcccaggtcttgccgacctccgtggtgaagcccagacggcgtttgttcatcgtgaccacgttgaagtcatcgacccggacgcgatcccgcttgatgccgaactccagcttgcgcttcccagcgtgaatggtgatgtcgcagccttcgcggaggaggatggcgatggcgtacttgaggccggtcccgaagaagccgatggccccggggttctccttcgagctgaccccgaaggtggtgatggacttggggtcaatgacgcccttgttgcggaagatgatcacgttgtgactccttttctcagggttgttgaaacagaatcttactccacccacactcgctcatagcggtccgggagggctccacacgatccgggggagccgtccgcgttcaccacgcgcacacactcccgggtcaggtagctgatatgaacctccgggcggtccagatagtccgcaaagacccccgccaggccccagagcagcaggacggcgaaggcgagcggagccacccagcgggcgtggtcacacaacctcgtcagcgtcccacgcatagccccgaaggcgattgacttcaaactcgaatcgcaacgggcttcgcgcagcaagtcctcgtgcgacttcttgcggttttgcgccgcgcgggattgggtgcccgtgtatgcggcggaaggcttcttgtagttcatgatgggtcagctcctttccaatctcgaatcgcggtgtcagtatctggggttggttcatttctcaactcgtgtgaagaagtatagtgggtcagtccgaagaagtaaagcggttcaggtcaattccagcgcacggcggatttcccgccggacctgaaggcgggcgttgagggccgcgcggtggtcggaggaagtccgcgagcacgtcaccatcaggggcttccccctcacggtgaagcggaccttgtagtgtctccggcccagctccaccgtgtaggcgatcccggccccctccagctcccgcttcgttgcttccagcgtgtcgctcatgggggcgtcctcagaatggcggcttgtccgacttcgggccgtccttcagaggctcctgggtcggttcgaccttgggccactcgaacgggccgccaaagttcttgtcccagtgcgcccggacctgctccagcggcgggaggtggtacatgtacacgcgcttcttgatcatcacctcgaagccgtgttcattggtccatggaatctccgccatttcctgcttcgactgcggccagccgtccgggaaggcccgggcaagccacttgccgaagccggtgcggctcatgcggaagttccggccctggtcgcggaggtcgttcacgtagtcgtcatacaagctgtccttcaccaccttgttccgccagtcctggtcggtcttgagcaaccggccctcccacagcttctcatacatccactgggtttccggcgacatgctcatgatcttctggtcctgcagcgcccgggtctgggggacctggcgaacctcgaaggcgctcaggtcataggtcaggaggaagtggagcaggtgctcaagtcctccgttgtccagatcgtccttgatgcgcttgaaataggcgtggtcctgcttgtggccctcgcccacctccatgacgaagaaccggcgttcatccagacccgcgggcaccacccaatcttcgttcgaggcgaggaccaggtgaacatagttcggggccgcttccgcatccacgcccttgccctcgatcaccaggtgttcttcggtcacgagggtcttgagcacgctttcgtgcttcttgtctccggcgaagaaagcctcatcaccgaacagcaggacggtatcgcggaggtgggcgttgaaggagcccaccaggtgcttcgagtcgctgacttggaggtagtgacgcccgaacatcgcgcccaggaccttggcgaagaaggacttgccggtgccgcggcgaccgcggaggaccacggccacttcgcccgggccgtccgggtgctggaccatccgcgccatccacccgaccaggtagtggtagtgctccgggttccctgagcagacgttgtcgcggatgtggttcaggaagggcatgtgcttctcgcccgggagggagtcgcacgcgaacccgcgccagaggttgtaggcttcttcgacctcctggccgggggcaaacacgatggtctcatattggcggcgctgagggtgatcaatccagaaggctcccgcggccttctcgatgggcttgccctcctccgagtgcccaaccactaccttgatgtggcggtagcggttgcggaagtcctcgaaggactgcttgctgattttggtccgcttcatcgccgggtcccagacctcgctgatgatgcggcacttcccgccgatgtccgcgatgacggcgtgcttctcgttgagcttgcgcagccaggggtccaccgcctcctcgtgggcacgttcgatctgccgcagggcgtagccttcccagttcggcttgtctctgacgctcgcggcgatttcgttggagccagtgatcaccgcaaagatcatttcatcagggacctccgcccgcacgaggtcgcagcagaccttgaacagggcctccgaccgggaggggtacttggtcgggtccaacgggtcctgcccagtagcaatcagcgccagcacgtggtcgctgatagccttcccgtgctcatgggcccactcccgcaactcctccgttccgatgtccgggacgttgcccgtgatcttcaccttcggacggcccccggccaggccctgctccgccatctggactcgaaccgcgggggtgaattgttcgatggggtagctggcctcattccactccacgagacgggcgagggtcggctggcgacccttcttgaccttcttcgcggtgggcatgttgatcgtgcccgggaggcgcatgatgcggtccacgttgtggcagtggtccgcctgaaacaccttctccagctggatgttgtaggcttccagctcctgagccttcgccaccgatccggcgatgtccagcttgtcggacgggttcagacgccaaaagccctgatagcccccgcccgagtcgatgatgaccgtgggcttgggcgtgtaggactggagcagcttcagagcccgcgcccgctcctcctcgaagtcctccccggctcgcgggtcgatgtccacgtgaagccacgcgaggcgggccatgtcctccttcgaggctttcacgtccatcgcccggcggaccgggttcacgtggaagtacaggttgcgcttgccctggtgcccttcgatccactccgcggccttctgccagcggtcgggcatgaaggtgactgtctccgttttcccgtccgggatgatagccgtcaggacccacggcccctccgggcaccacttcttcaggaagtcgattgcgtccttggtcttgtgtttcggcagttccgccattgttaattcccccaccgcttgcgattcatctcacctgcccgttccttcatacccgcggcaatcttcgcccgggcctccggtgaacagacagtcctttcccggtagccgtcctgcgccatgcgttgacggcccaattcagcttgtcgctgcttccgcttcgggtcgccctcccaagccttgcgctgggcctgggacagtatctggcggacctccggcgaaaccgagtcagggaccttcccgcccgcggtgaggttgaagccttgcggatacatactggcgtgttgcccaatccagaagatttcccgggcgttcaggttctccggctccgcgacttcgagcagctggaactccagggcctccggtccttcggtcgcaacgatttcgcgcagatagcggtttgtgtcgcccttgcggtgacgttcccagcgttcttccacgttccgggcttgccccacgtacttccgcccggagggtttatggttgatcaagtagatgccgcaggtcatgtcaaaacccccagtattcgcgcaggcgctccacgggggcgttcccactttccatttgaatcagccagaggcgggtacagcccaaggcggcggcgacctcgcgctgtgttttgcccgcccggcggcggagcaggaagcagacctcatggggcttcaactcgcccaggtgacggcgcggttggtcgtccaggcggcggtccgcttcccagtcgcggtacttgtccacatggacatcatactccttcgcggcttcgatctggttcaggttcttgcggcggcggtgtagcagcaggctttcgcccttggttggcgtcagtatagcagacatttacaaatctcctcagttcttgggaggcgtgtccatcgtgcggcgcacacctcatacaggcgttctcgcggaacccggcccagcatagcagcggccaccgctccatcgaatagcaaccactccgtctccccgaccttcagcaggaggaaggcccggcccccggccctgcggcgacgggtcagccaggtcctctgctggcgggtgaagtggtccactcgaagcggtccgcccctgggcggccagcgttcagcgaacttcaattcaatccagccctggttgtagttcacatccggggtcccgggcacaatggggttctccacgcgtaccgggtccagcgaccggatgacggggcggagggagtcccacattgcggcttcagacatctacccacctcacttcgatgttgtagcggcgggcgacttccaaagcctcatcaatgcgtcgattccactcagcaacccaccccggatcgcggcccgagtagtcgatgcccgggaaggcgacccgcttcacgcccgccttccccgcggcctccatacagttcggacagcaggggaaagaagtatagagcgtgaagccagtcgcaggcgagcctaaaaagttgagcgcattgacctctgcgtgaacaacgtgctggtatttgtacccgcggtcagcgtacaactccggcgagtcatcgtgcccgggcgggaagccgttgaacccggtcgaagccacgctgttgttgggccgaaccaggacggctccgaccttcgtggaagggtccttgctccagcccgcgacgtgttgggccagcccaacatagcggcggtcccagcggtcttgacgttcgctcatttcacctcctccttcagcaaaaccttctgggcgacgttcccgaggaagtaaccgcccagcaggagccaggtcaaggactcgaaggcgtccaccggcaacttgcccatgtacaggagccagaccaggaccgcctcccagatcatcgccgcccagaacttccgggaggtccagcgcacggcgatgtcgttcatatcagccccttctcgttggcgatccattcggtgaccgtcagggtcgctgtgcggcccttcttctcgaccgcgcggacctgtgacttgggcatccagacttcctcctcaccgccgtggtcgatgaggtatgccttgtctgtctcgcgcttgatgaccacttcgaggtccacggtgttgtcgttgctgcggcgcatatcgttctccaggggttcgccccggacttcctccggggtcaggcgggtacactttgcgcagcgtgcgtccgcaaacaagtaagtgacctgcgcgtcacattgatagcagaacttcatgatggtgggttcccgtcccagcccatggaatgaccccagctctgcccaatctccacgtccacctttgacgggagttcgagcggcgtgcacgtcctcatgatgtgggcggcttccgcggcctccttcatgtcgtgtacgctgaaggcgatctcatcgtggacctggatgatgatgtccagtccggcttccgcgcaggccaccatcgccatcttggtctggtccgcggaggagccctgaatcagccggttcagtcccttgtgggtccagtcatagttcccgtccttgtccttcgggaagcggcaacggcgaccgctcagggtcgtgatgtagcccacggccttcgcccgggcttcgcaagccttcgccagcttcttgatgaacggcaccttgtggtcgaaggtgtccaggagggcctgaccctccggccccgcggcctcgaacctccgcgccccttccgcgaccaggcgctgaccctccgggctgttcacgtcgaacagctggaagcgggggccgcgcacggccatcatagtcgggagcccgagcttgcggcacatcttcgccccgcccatcccgtaggacaggcccaggtagatttccttggcgtccttgcgcttgatccccgccatgtccgccatcatctggtggttgtcggtgttcgggtcgttgcggtacttgtcccgggcttcgattgcggacagccaggctttatgcccaatcaggtccttcgccaagcaggcgtagtggaccgccatccgcggctcctgctgcgaatagtcgttggaggcccacagctccccctcctccggcaggtagatcgcccgccacatcatggcgaactcatcccgagccggttgctgctggaggttcgggtgttcgctggacagtcgcccgtaggcagcgcccgcggtcccgtcgctttcgtcatccttctggcggcggagctggttgaacgtcccgtggaggcgaccgttcaccatgtggtcccggacggagctggcgaaggtcgtgcgcagcttgttcaccttccgggcgcgttcgaggaggtccgccacggggtggtcgattgagcccagcagctccttgtcgatgttgggcttgccctgggaggtcttgttcagcttgatgccgatgtgttcaagggccggggcgatcacctctggcttccagacatcgcccacggcgatccggtggccggtaatcgaccggacttgggccagggcctccgtctccttctccagcgcccaacgctcaatcatgtccaggcggtcgcagtcaattcggacgccccggcggcgaaggcgggtgaggatcgggagcagcttggactccaggttgtacacgccccagaggtcctgctcatcaatctcccgctcctgacggcggaggatgttcagaggcaggcgcgtgtcctcctccgcgtacttcccgacaaacttggccgggagcatccacatgtccttcttcgggtcaatcccataatcgaccgcggcggctcgcagcagggcttcgtccttgccgtggaagccccaccgctccgcgatagcttgcatgctatagctgtcgtggagttcgcagatcagcgggtcagcgatctggatgtcacggaagtagcggacccgctcgaactcgatgccgtccccggcgaggaagtccaagtcatacgggaggttggcccccacgaggtcgccggtgaacacctttgcctgggcgcggaggtaggccagcacgccctccagcgggaggttgcccccgccttcgtgtctgatgggcaagtacccgcccgggccgtcctcgattgcgaagctgatgccggtgatgtagctgttcgggcgacggcccgcccccggcccgagtttgcgcaggtccgggtcccgcgtctcgcagtcgatggcgacccgcttggccccctcccacgaggggagggtgctgaggtccggggccacccagtcgctggagacggtcgtgaacaggggtggttggaggtatgacatcaggctccgacctccgcaatcatcttgcgcaggaggttcagggccgcggtcagctccgggtcggactcccagaaggtgaggatgcggaccacttcggcttcgtcctccgtcagcccgttcgcggcggcgaaggcgtccggggtaatgaccacggcggcggagcggggcagcaggaccccgttgcggtacaggtcctggaccttctccacgtagtggatcgccttctcaaggtcctggcgcgggtcctcgtgcttcttgcggttgcgggtcgcgtacttggtcgcgcagccttcggtgtagcggaggccgttcagctccacgtagtcccagtgttggacgggcgagcggtagtgctcaccgcccacttgcttttcgttcacgctcatcttgtaactccttcatcagttcccggagccggagtgtctgctggcggtacaagtacccaaaacacccgtgctccccgttcatcatatccgtgtggaccttgcggaggtgcgcagcgagttcttccaccgtgtcgaaggcgtagaacttcagctgcgggtcctccgcccaatcacgtcgcagcttctccaagtccatcgcgcaccacctcctcgaagaagtccgagagacggcgatgcggctggtgcttcgctgccacgtagaaggcacggacgggttcgggcaggctaccctccaggccccgcttctccgtcaccgcctcgcatgccctccgcatggccgtgaccgcttcgttgcccagggcttcttcctcccggcaccacagccacagttcgagggtgtccacggccttcaaccagtcctcctcgtcagggagaaggcccgggagcaggcccagggtcgccagcacgcggcgttccgcctcctcatacaccttcccgagttcggagttggtccacttcgccggggccggaatgtcgcccaaccaacgctccgcgcagtcgtgccactggaccgccttgatcaggttcagcgacgggtgcgggtggagcagcaggaggaggctcacggccccgtagctgtgctgggcgatgttgtactgaccgtggtgcgggacgatgtgacaccggcgaaccgtcccggcctcccgggtcgcggcgatccgggtcaggagcgggcgggcggcgcggcggttcagctcctccgcctcgcgctcctcgtcatgaatcttgctcatcaggcttcccattgttgcgtctcctcactcatacgccacgccatcgtccatcgcccgggccttgcgagcctcgaaggcggcgcggcggcgttcgatccactccaccccggccagtttccagtcggtggcggcgacgttgtccagctccgccaaggcggcgtcaaagcgggaggggttggaggtctgcttgaaagccttgtgggccttcagcatcgggatcgccacgcgacggaagaacgggtcacggaagcccacggcgtccggttcgctcaggaacatcatcagctcctggttccactcctccgggtccgtggacatcagcgggtagggctccgcgatcccggcggcgtaggggtcgggcgtctccttcccggtcatcgggttggcggcgaggtccgcgagcggggcgaccttgtccagcacctcctcataggcgtggaagttggcgctgacttggcggtagatgccttgttccaccccgacactccgggcgacgtactcatggaggtagctgaaatggaccgcgttggccccgtaggctccccagatcaggtcgttggagcggttggtcacggtcatgtccaggcgaccgtcgcaggcgatctggaagatggcctgaaggttgcacgggaggtccttgccttggcggcccaggtccgcgtccgcgtcccacatcgacaggacctggcggcggtcatcgcggttcgccttcagggcggcgatgatcttgggcagctggtcctcgaagaagtgctggcgccagcggaagccgtaggccccgtggaaggtcaggccgtcatccgagtagctgcgcatgcgatccacgaagcgggcgacgtactccacgtcattgcgtccgcccaacatccagaggctttccatcaggtggaagaaggggttggcgtcccgttccgcccagaacagcacgcgctccgccgggcggaggtacacggtggtgacgggctccgggaacatgaacacgggtccgttgcgggagtcgcggcggacgccctcgaaggacagttgatacagggcctccgggagggcctgttgtacgttgcgggtcttgatgactttcatttcttgttgaactccacgaaaatgacgttgccggtccggcgaaggacgcgggggcgagggagccagaccaaccaccagctccagtaccaccagaacggcgagaagatcatggccccctcctgttaggccgaagcggtctgaggcggaaggcccaggcgggcgttcaggtccttgatcggcagcgcgatagcccgggacggcgattcaaccgcgaaggggcgggcgaactgctccacctccggccagacctgaatcagcttgttgaccgtggtcacgctttcgaggacggcccaggctccggtcttggcctcctcccgctcgcgcttgaactgggcgcggtccttcaggtaggtgcgcagcttctcgcccagcgggtggtccgcgttatagaccttgccggggttcgaggcccagcaatcggccacgcgcttcttctccgggaggtccagcgagtgataggactccccaaccacctggacgcggatgttgctgcggacttcgaggaagccgttgggcagggcgtacatgtgggcgcggaccgcttccgggtacaggtcgttgtagaactccagcgccagctccttctcgcgggcgtccagggccttctcgcggtcggagaaggagtgggcgaggatcgcgtcacggacctgctcgcggatgtaattggacagacgtacagccatgatggtttctccatttcgttggtgccgcgggaatggtccggcggcggggtttcgatcaggcgagggtggttgccttgcgccagtcatacttcgagcgcatcttgccttcgttcaggcgcacgcgctcatacttgtcgaactcgcacagcgtgtgttcgatgtcccgggcctcgaaccgcggccccacgtgcgggctcccgagctgcggcggtccgaaggtttcgttgaagccccgggcgtccagggcgttcagctcctgcatcagctcgatcatttccgcgttcgtctgctccgggcggggcttcgcggcgaggtcgcgcccatacaggcggttgagcccgcggatcgccccgggaccggcgttggcccaagtccagatgtccggggcgttgcgcaggtagcgggtgtggcggaggtcggtcaccacctcataggccatgaacggaccccaaccgatgtagcggggctgctggaacttctcccagacggtttcgagccggttgaaggcccggaggacgcccggagtggtttccagcatccgctgccattcctcgcggtcctcccagagacggcccaggacaatctccgcgatgtagcggtgcttggtccagctgtaccactccttggaggggtcggactccgcgcggatcatgtaggctccggtgtacaccttatcgccgcggacggcgcggtgctccagagcggtcgtgagccaggaaggctcgaagtcagggttgtcgggccactgcttggtctggatcagctccgcgagggtatccggccaattgatgtagcgggcgatggcgagcatgaaccagaggtgcgggtggtccgcgtagggctgacgaatgtgcttgtcaacccagatcgtcaccgtgtccagctcccggaagatgttacagaaccgcccctcacgcagaaccgggtccgtggtccagggtccgggcttcccggccttgcggtccaggtagatgtcgtggcgggccttcatgaaggcggcgatgtcgttgatgcgcggggtggtcatagtcggggtcctcagcccaagttctcgatgacggccttgatgtccttcagggccgtctcccagtggatgtcgcggaccgtctcgccgtccgccagggccttctcgcggacccgggcgatggtgcggtgcttgtcggccacctggtcctccttgatgggcttcccgccgttgcgctcctggatacgcttcaggcagacttcgagcggcgtgtccaggaaggcccagatcattccgccgttcgccttcgaccactcctgccacggaccgtagatggtactgaccaccacgccctcgaacaggaccgccttcacgtccgggtcccgcccaaccagctccgcgacggccttggccgcggcttgggtcttgatccggtccagaccggcggtggtcgctccggcggcggcgggggtgtagtccccgatgatggcgatgccgcccggggcatacgtcaccgggatcggcttgtggtccgggacgatgacgttgatgacgcggcaaagcggatcgcgggccaggcagcgcagcagggtggtcttgccggagccgttacagccccgcacgttgatgtacttcatcttggttctccatttcagttgaaaacggcggagccggagccccgcctgggttgctcagtcaatctgcgtgatcgggatgatcttgcgctcgccgccgtcctcctccggcggggtcggttccacgatcttcttgaagtcgggcgagcgcagagccttcgccgccccgaacagttccgaaccgcagcggggcttgccctcgttgtcgtccgcgcagtggagacagccggtgggggcgcactccttgacctcctggaagggctggcccagatcggtccgggtgaacatcgggacgcgctggccgtggcactggtccgcggtgatcatttcacggcccatcgaaagccaggccggttcgccggttccgggcttcccgcggcggtactcatagcacgtcgcgtaggtcatgcccagctccgtcgcccacttccggtacagctggtgggcttcgacccggtacggctccgcgatggtcttttgggctccggcctggttctccgtgaacaggtccatgaaggctttggtgcgctccgggccgaaccgcttgtggagacgttcgatcatcgccggagcccagctgtagcccgcttccacaaacttcacgatcacgtggttgttgccgaccgcggccaggcgctcgaacaggtggcggatgtcgtcatgggtgacgatccccgggaccaccggattgacctgaatggacgtgtagatgccctgacggcgcagctccgcgatttcgtcaatgtggtcctggagggaaatggccccgggggacaacttgtgccaatcgcggtcgttgccggtgttcagcgacttctgggcgtagctgtaggggttccgcttcaggaggtcgatggcccaggacgggtagctgagacggctcaggaagaagatgggcaggcccaactccacgaaggcttccgccccctgctgggtgttgtggtacacgtcctcaatcggcaggaaggggtccgtgaagctggagaagtagcccgcggcggaggtccgggacttcgagagcatgttgcggacctgctcgccgtagttcaccgggacgctgatgagtccggtgccgcggtagccccggaacccgctgttgacatagcagaaggcgcaacccacggtgcagtagcccccataaggctccgtcaggatcgcctcgctgaagcaggggcgggcgcgggaacctcgcttgtcgttgtgcttgtcctggtaccagccctgaaggggcttggcgttcgggatgcggatgtgcgggaggtaggtgacgtcattgaagccaagatacaccttgacctccttcttgtcgtcatccttcgcgttgcggaccatccccaccttcgccatgcggaacttcgcgcgcatgccggtcagcgggtcgtcctcctcctcgattgggcccaggaactcccgttggttcgggtccgggcgcatgaaatacttgtaagcctcctgagcggcttcgccggtttcttcattcagccatgctgcgtggtccatagttcaactcctcatctattgcgaaaaagtctagtgccttacccggaagaagtaaagcactatgaattgggtcactccccgatgttccagaacacgatggggcgtggatggacggaagccaggttgagcgggtcactcagccacttccaagccttcagatcatagaacgggttgcaggggaacggggcggaggcgtcccgggccgcgtccgcgtacccgtagccctcgtcaatgaacttgatccggtcgcccaaggtcagtcccgcggccttctcgatgtactcccgggtggcgtcctggctccgcgagtaacccatgtgaaggatgacgttgtagttgcggagcaggcccgcctcctcgaagcccttgagcaccccggcggcgaccgtccccgagctgatactgatgaccagggtcccggagtccgggaggtgcggggcggtgcggacggcctccgcggcgttctccgtgatcgactccgggagcttcagggcgttcggcatcaggtagctgtcgtggtagttctcccgcaggtgcttcttggccgtatggtacaggatcgcggagcggcccgccgggatgtccacgaggtccgccccgagctggcgagcgtgctgctgttggacgcgcggggcgtccgcggccccgtcgcgcttgaagcggggccagtagtccacggcctgtttcccgagctgctggcagacgtaggcgaccgcccagcccgccttcgagtggtatgtgtccagacagccgatggtggtctcaggccggttcttgatatgggctacaactccgcgaatcttgctgaaggacggacccgggagcggggcgcacaggtcctcccgcttcacgaggatcgggaccccgttgagctcataggtttcgaccggggtgttgttgacgatcatctcactgctccttgggcatgtggttgaggaaggcgcgggcggcggaacagcgccctgcccagggttcgaggccggtgttgatctcgcggatgtcattccagagcgggtagtgcccattcatgtgagacttccacttacacaggaccgtctccacctcctggatgttcacggggcggtcgcccaggggcggagcagcgaggtcagcgaaccgcccaatcaggtagtccgcgaccccggacaggatcgcctcgcgcttgggcttcgcgttctccgggtacttgtgagcctcgcgctgctcccacagcatcatcgcggccttctccgggtccttgaacatgaacacggcggcgttgtcgaagtccaccgggacctccatcacccggtccatcatgtccgcgatcttgaagccgatccacggaccgaagccgttgtgctcctgggcgcgggcggagacggtcttgaagggcaggcgctcatcctccgtcgcccgggctcccacgtacagggcgacgttctccgggcggtcgccgtaacgggcctggagggaggtcacggagtccacggcgatcttggcccggtagtggcggcgctcatgcccacgaggccagcgacccccagcgggcgtctcctcctcgttgcgggccgcgaccatcatccagtgccagaactcctcgccctccttctcgctgaggaaggaggcgacaccggcgtggtagtagcaccaatatgcgaggagccaacggcagagctgcggcacggagaagtcgcccgcggactccgcccggaccagggcgatgtagatggggtccagatcgccggtggtgatcaggtgtcggccaaacgtctcgatgtccagccgggggtagtttctgctcatagtcttttctcacaagtatgcgtgactgattttcccgctcaggtccttcaagatgtcccaatcagagaattggcgactgaaggaaggctccatgcggacttctttgttgacatgaatacgggaatggaccgtcagccacttgctgtcgccgtcctccgtgatcaccacgtgaatccacggaggtagcttgaagggctccattctgtatccccgctccgccgggtactccacccggcggatcaggtagtcataggtgcgctccgaggctcccatgacccttgcctcagtcaaccaggcgggtctggcgggcgtcagccttcggggcggacttcagcggcttgtgggccgggatcgcgtggccttccgggaccacgatgtggaaccgctcagtgccgtccgcgtcgaaggcggagcggaccccgtagcccttcagcttcatgtcccagccgaagccggagcgcacggtggcttcggtccagggcttgttgccgccactcagggcttcgatcagttcagccatggtcgcaccgttcgggcgggacagcatgtccaggagcatggcctgcttcgagccctcgcggcaggggatcggggcgtggcccggggcggccaggttggtgccgcgcggggcgcgggccttcttctcctccgcggacttcggagccttctgggccttcggagcagcgacgggggcgggggttgcggtttcgttcacggtttcgaccttctggggttcggcctgctcgtcagcctcaacttccgggtgcgcttcggcataacgctgaagcatcttccaggtgcgggcaatggcggtggtcttgtcggcaaagcggcggacgttcgggacggactcgccgttgcggaaggtgccgatgacttcgttgtacagctcgaccagggccgggccggacagctcgctcagggaggcttcggtgtaggcgacgttgttgaagttgatggcgttcatggtaggctccttttctggggttgaggtgcgatcttgttcgaccgtgagagaatcttaaccccagcccccgaagaagtaaagtggtttgactaaactttttcaggtccccgtccgaaggccaacaaccgttggacggcggagggcgaaccgttgtacaacttcttcccagaaggcccgggcggcgtcctcgtgcccaggcttcctgtaccaatggttgcgccccgaggtgtgcggaaccacagcgacctcgaagccccagcgatcatccgcaaaccactggtggaagtccaggtgctgggccggatagccgaaagcctctgcgacgttccgcccaacgaggatgacgtgccgaccgcccaacaagggcttcatcgcggctgcggcaatccccgcgtcccgggcgggccacttgtcgtcccgcttccagcgccccgggaaggtgtggagcaggttggtgcggtcgaaggtcttgaggtagtccttgggcgataggcccgccagctccgccagacgccctcccgcggaggaccgcgggaggggagccaggggccggtcggggtccgtgttaggtccgggtgcttggccgatgagtaggggcttgttcattctggggttcctccatttcttcttgcgtgacgttcaggttgatggtccgctccgggaccgggatggcccattcagcaaggcgcatcccggtcatgagcaagaacccggcggcgatcagcaggaccgccttcaggctcagttctttcactcgcactccctccgtccggtggccgggtcgatgcggcactggcttgccggctcctccgccggggcgtccgcttcgggctcgccgccgtcatccttcaccacgaggatgcccgaccgcttcccgcccaagcggaaggtggtgcagcccttcgcccctccttcccaggcgctcacgtacacgttcttgaagtcctcccagctgatgtcggaaggcacgttgcaggtcttgctcaccgcggaatcgacccgctgggcggcgacggtcagggcggcgacgtgttcctggacggtgacgcgggagcaggccttgccgcggaccccgaacacgcgggcaccgtagtcctccaccgtctccacccgcgggccgctgaactcgatcacggtgcggtcgaagctgtaggcgaacaccggctcaatcccggagctgacgttgtcggcgcacaggctgatggtcccggtcggggcgatggaagtgaggtgggagttgcggatgccgtatttggcgatggcgtcccgcgcgtcctcgcggagggtcttgatgaactggccctgaaggtacttgtccttgtcgaacttcgggaaggagcccttgaccttggcgatgtgggcgctggccaggtaggactcgtcacgcagcgtgtccagcacctccgcctcgaaggcgaggaaggcgggcgaaccgtactcatggcccagggcttcggcagcgttggccaggccggtgatcccgaggcccatgcggcgcttgtccttggcttcctgcttctgctgcggcagcgggtagatcgcgcgatcaaccacgttgtccatcgcacggaccacctgcgggatgtcctcgcggtactggtcccagtcgaaggcgtagcggcccgccccgtccttgaagatgtacttgaccaggttgaaggagcccaggaggcaggcaccgtagggcgggagcggttgctcaccgcaggggttcgtggcggcgatggtctcgcagtaccagaggttgttcatgcggttgatcgcgtcgatgaacagcacgcccggctccgcccaatcccaggtcccgcgcatgatcgcgtcccacagcgcccgggcgtccacttcgcggtaggtccggccctcgaaggtgagggggaacggctcgccggaggcgacgcactccatgaacttgtcggtgatggcgacggagacgttgaagccggtcagcttcagggtctgctgaagggacatgatcagctgctgcttctgggctccttccgggagttcggccacgaggtcccagagcggctgaacgtccttcccgggttgcttggcgtgaatgaactcctcaatgtcgggatggtccacgcgcatcacccccatctgggctccgcggcgatggccggaggaggcgacgcacttgcagatcgcgtcgaagatgtgcatgaagctgatggggccggaggagtgggactggagcttgcggatcaggtcgccgcgaggacggagggtgctgaagtcatagccgatcccgccgcccatccgcatcgtggctgcggcttccgcggcccggaccatgatggagccttcgccgtccacgaagctgtcgttgatcgtcccggagacatagcagttgtatggtgtgacttggcgggtggagcccatcgcggactggatgcggcccgccgggaggaagcgcatgcccaggagggcgtcccggaagtccgcgaagtgctggtcatcgtccttcagggccgcggcgatccggttcatggcctcgcggaaggactcgccgctgccgcggtacttctgggagtgtagttcttgtgaatagggtacttgaggaccgtgcattttgcgagtctccttgaagggttgagggctttctatcatatcgttgctcctgttcttgggctacatcataacgaggtcgatgcgttccgcggcccgggtaatggcggtgtacaaccattccttccggtccttcccgtaccactcatcaaacagcaggacgttgttccactgggagccctgcgacttgtggacggtgagcgcatagccatagtcgaactcctccgcgtccttccgctcccaatactccggcttgttgccgtggaagtagtgggggtgggcgctgacttcgaccttcgcgccgtcctcgccttcgatgtccatgatgacatagtcgccgtcgaagatcgtgtcacggcggaccttccagagctgaccgttgagcaggcccacctcgtggttgttgcggaggcacaccagcttgtcgccttcctggggcagggcgttcgtccgcccgaggagttcccgggcacgtccgttgctcgtgattctcgtggcgttcctgccaacgaggagctggtcagtggacagtaccatgtcccggagttcttcgcgtggcaggcggccatagggaatcacgcggctggcaccgtagtcgccggggcggagcacgcggccctcgcggacctccttggacatccagatgatcgggttgtcctgggcctggcggtgaatctccgtgagcaggatgtcgggcttgttcttgaagaagggggtgccgcccacgggcgggagctgcccgggatcgcccagggcgaggatcgggcaaccgaagctgagcaagtcctcccccatctgctcgtcaatcatggaatactcatccaccacgagcagcgcggcctcgaacaggggcgactccgtgttgagctggaacatcgggcgggcgaggttgatctgctccgccttgatcgccgcatcgaccttctccacgagggtttccgggacgggcttgtgggttagcagcttcgcccgctccgcttggagttccttcaggcgctgctgcgacttgtccttgggcgtgtagatgagcttgtgaatggtactcacgttggtcgccccggacttcgtgaggacgtgagcggccttgccggtgtaggcggcgaagtacacgggaccattgacggtcgcggcgaggtgtttggccagggtggtcttgccggttccggcgtacccggcgagctggaacacgggcttgtcccgggtcttgagccaccgcccaactcggtccagcgcggtctgctgttgcggactccacatgatgatcgttctccgtttctgatgaaaagaagggggccacgaaggccccctgaaggtacggcccgagggggcgggccgtccgggtcggtcctcccggtagatcagaacaccggcttgccgccgcctgcgccctgggcttcttcgtccgcggagcccggagcctgcgactcataggcagcgcgggccttgccctgctcgatcatcgacttgatgttcacggcggactggaacagcgggtcatcgggcaggaggcgagcctgctgggcgttctcgccgtcgaaggcgatggcgtcccagttgaagaactggcccttgttgttcttctcgctcacggtcttgaggcggtagcggtgggcgaacagcggagccggaatgcggcgaccgtccggcagcggaatctggatggtcttggccttggtcatccagcccttgtacttcttgatcttcgtggagctgaaggccaggaccgcttccgaggcgttgccgtcatcatccagcgcgatgccgtacacatagaaggtttcgatcagctcgttgccgtccggggtgctgtacttgccatactccgaggacgcggccttggcgtggttcaccagatcgctgttgacttcgtggatgcccacgaaaccgccgcccgcatcgcggggcttccactccacgtacacgtgctgggtggtcgccgggacgaaggcaatgcccttcttgccgtcccagacttcgccggtcacggtgttcaggatcatgccctggcgcaggctgtcgttctcctggagctgcgggctgagggcctgaagaatctggaggaacgggatgctgtagtcatcgctggtctggttctcgaaacccgcgcccgcgtagtcggcatatgcgccatactccgccattgcggtgttctgttccttcactgcgacatcggtggtcttgctatcggtcttggccatggtgtggctccttcggttcaatgtgagcgggtcgattgggcccccggtcgaatagccctgccgtctcaccggctgtacccgctgtcacccgcggggcggttcggtcgggaggaaggcccggggccgtcctccggcattctggtcacacttcgatcttggacacgcgctgacgatggaccccgaacaggtccagggggacttcctcgccttcacgcagcttctcgcggacgaaagcggcaagggtcgaaggatggacgctggcgttgtcgtccacctcgaactcgtccgcgagacgctggcgcagttcgtcagccttctcgtcctcgcccttgccgaaggcgacggcgaccacgcgcttgatcatcgcggcgtggccgtgctgcttgagccaggcgaaggcgagcggggccttggccttcgggatgctggcgcggatcgtctcgtcaatcttgatcttcaggccggtggtggtcttgaactcgccaatgccgatctggtccatgagttcgggcacctggcgctccgcgatgtcgcggagttcttcgcgggccttgttgagctgggcttcgaggtctgcgaccttcgactgggcagcggcctgttgttcggccagctgagtgagttggctcagttcgccaccggcggtctgaggttggacatagtccaggtatgcgttttcacttgacatgtggttctccgtttcttcggtgagggggtatcccaatcacgctgaagaagtatagccggtcaatcggaagaagtaaagaggcccgaggcgtccaccgcgatgtagcgttggtccttgccgctccactggagcagggacacgtccccatcattggcgtccgcggcgatggcgacggcgaacccgatcaggaccggattgcccacgagcaggaggtggtcccccggcccgaagtcggccagcttctccttcagctcatcaatgatcggctccgggcggaagggggccgcggtcgggctgagcaagtacaccagctcaccgaactcctccgccggggtcagatcaaatttgggctcgaaccgctgcttgtcgcggtcccagcggtgttggttctgtacaacaaatacacggctcatagtagtctcacaaccagtctttgaggcggtcgccggtgatctggctcgccacgttgaatttgttcctcaacgcttcaaccaccttctcatccacggagtcctcagccacgaggtcgatgtacagcacgttgttggtctgtccgatccggtgggcgcggtcctccgactggaggcggtcaatcagcttgaagctgttggaataataaatgacagtcttggctgcggtcaaggtcagacccgtcgcccccgccgcggggttgcccacgaacacgcgggcctgttcctccggcgggacggcctcgcgcccaaccacctgtccgttgtggtacagggggcgctcgccctggaaccgggccttggcgtccgcccgctcatcgtcgttcaccagcccatcatagcggaccgcgctgatgccgcgctcgcggagggcgtccatgatcagggtgatgtccatctggaaccgggcccagacgatcaccttgtgctgggactcctcgatcagatcgcagagcaggtccaggcgacggttcggccccgggatagtgtacacgggttccgcttcatcgtcggtcggaaggtagccgcaggtgatctgctggaggcggaggagccgggtgatggcgagggcggcgatgaccggggtggtgccctccgcgcccaggtcgggggcgtccccgcagtcggggcaggggtagatgaagccgtcaaactccacctcacgtttgcccaagcaggtcgggcaggcgtccggcgacggctccgcggcgaccgcagcggcgtcccgttcaatcccgcccgtctccagccacacgatgtactcgtcacgcaactggcgatacagcttgccctgctccggggtcatcgggaagaaccgcttgctgtacagcttcggcgggaggtccagcacgtcatccttcgtgacccgggaggagacgggctggagtagggcgttcagatcgtccaggcggcgatagcccaccagcacgtcatactcgttgccgtcattcttcttggtcttggggttgaaggcggtcgggttccagcccttcttccagataccgaagtgctgcttgaactccgtgaaggtccccaagcggttctgcttccagtagtcgtcaatcaagaacttgatctggctgtaggcgtcgaagggtccctgagcaatcggggtcccggtcaggacccgcctgaatggcgcgtacttcgcggagcggaggatggacttggtgcgctccgcggtcggggtcttgatgtagtgcgcctcatccaggacgtacaggaggcggcgcttgtcgaagaagtcaatcagcgcccgcttcccggaggcggtcatgaaggcttcatagctgatggtgagccaggcgaagcccttgtgctcaatgacggccttgaccgcctgcttgtgccacttggtgtcggccttcgggctctggtagtggaaggcccggacgtgcttgatcacctcatcgggtacgtggtccgggatttccttctcaacccagttgcggtgcacgccgttcggggcgaccaccagcacgccgtcgatgagcccgcggagccagagccagcaggcggtgtcgatggtcagcttggacttgccggtgccctgttcccagaagatcgcgcgggcttcttcttcgcgggagcgcaaccactcctcacgctggtggttgaagggttcggtcttgaaggggtattccatagggtggctccatttctcatagtgatgcccggaagtatagcccagctgggcggtgaaggcgagcggataatcatgtgcgcttgggacggtggcccaacgctcgacttcgtgtgaggaagaagtatgaagtggagtaggcagggaagcccagcggggctgggggtttatatattcttcttcttcttcttcttaacttacttaacttacttaccttaaacccccggacggcctccgaacagcaggaacggtcgccggtcgcctccctgggcagggggtccgggcgatttatcgggcgaagtagaactgaactggagaaagtgaagtaacctaagcgcaggagggtcggagctgttacggcgctgggctttcgatggcgcttggggtctatacttcttcaggtgtgaaggtaagtaccccaagcgcatcctcatttctgggcccactccttcagcccgaggattagcaggctggcgaggcccgagaagaagatgcccaggagggcgacggtgcccttgcgcttcaggtcctccccggactcccgccattgacggaggtgttggaagtcccgctgcatagcaaacgggtcggacgtgtccaccccgagctgcatcaatgtctgcttgaccgcttcggccaccacatcgttcagctccgagtgagacatggcgaccgtctccgcggccctccgggccgcgtcctcaacggatagtttcgccgcccgggtcgcagccgcaacggcgatgtcttcgacttgctccggggtcaggggcatatcggggtcctcgcaccaagatgatcttgggccgtattttacggaacccaagacaacttggcaaattttagacggctgcgcccgtcgcgtccacccaggcggagcccgtggaccagatcggcttgcccaaggtggtgtcgaagtattgacccccgaccagggcggcgctcgccgccgggcggttcgcggtcgtgccgtagccgcggaggaacttccacgcgctgccgtcataccagtaggtgctgttggtattctccacggaaatggtccaccccttcttcggcgcgaagaactcccaggccgtcgccacgctcgaataacgcgcgatccgttggccctggcccgaccagttcgtgccggtcggactcgccgggagcacgtacacgtccccgtccgcgggcgaagccggttgggcggtcgtggttgcggacttcgcgtggcccatgagaaggccgtccacagcacggaggaaagacatgaattggttgtagtgctggtcccccagcgtgccgttcaccatgatgcccaagttcgggccgttactgatagccatcacaaacctccaagatagtttccaagattgttcccgagtccggcccgatccacataccaatcgtgggattggtagctgtccaggccgtcgcggaccgccgtgaccgtgatccggttccggcccgcggtgttctccgtcgcctcgttggtccaggtccagctagtgccggtcaggcccggctccgacttcaagagcgtgctgccgttggccgcgtagatgtccacgcggtaggtcacccccggctccgggccgatgttcgccgcggcgtggtcgataatcggacggaccacctgctgggtccggtcgcggtgcgcccaagaaaggctcagacctccgaggatagccgaaggatactggagactgttcacccggaagttcccgggagcgtaggggcgtgcgaaacggcccaccagcgccttcgagtcctccggcgcaacggacaggtccagaatgccgaccccggaccggcccaggcccttcgcggcgatggtctcgccgctgttatactcaagacggtcgcgcacgcgggcgtcctccgcgaaccaaaaccgcgccccggctgcgtgttccgcgcagacggtatccaagcacccccggcccaccgtcacgatcccgttcaccaggtcgatagtgtccacgcgcacgatttcgtcgtcaatcagcgcataggtccccgtccgcgcaaattcggtgcgggaggacagattggacagctggatggaggtctgtatgggcgtgatcgcgttcgtcagcgtagcatgcgccgcggggtcgccggtggccgcgtatgcgtaggacccgccagtgggcttcgtccacagttcatagttctggaggtactgggcgggctcgcccatcaggccgatcaggaaggcggaggtgttgtccagcgcctggaagtcgcccgagggcagaccgttcgccaagtcccaatagttcgcctcctccagacggcggagggcgaacgggttgggcgcttgaaccgggtccacccagcccgagccctggttgcccatgtaggtggaggacggaaggccgaacatgtcctcaaccgcgtccaccacgatttcaccactggtcagctccccgtagttcaccccgaggacgcggaacacgatgtccacgaggctgtgctcatcccaggagaagcggaacacgtcccccagggtcaggttccatgcgttccggttcacccggatgcggatgcgcgcgaagggggtggacttctggcggaggtcgcgcatggccagtttcgccgcgttcgccgcggtgtcgatcccgggatagttcaccgtctggctcaccacgccctgctgggcctggatcgcggcgaggtcctggacggtcacggagtcatcctcagtggagccctgcggacggtaggtgaccacgatttcgttgacaatttccgcgtagcccgggcgctcgaaggactccagccggatcgtgttggactcgttgaacagcgggaggtccgccaccacgtagtcctcgcggatcagcttcaccacgaattgaccgttgtcgggtcgcgtgtacaacatcccgttacagtggcccagcaccgtgtatatgaaggactcgatggagtcctgcttggtcatgatcatcgacacgcccaagccttccgcgtgaagggtgtccgccgcagcgcgaaaggcggcgtcatccagggcgttgatcgggtatcccatcccccaatccgggttcgtcagcgtctcatagatcacgtgcgcggggttcgcggagccgttgatgtctgccttctcctggtaccaagccttgcccgggaggcgcttcaccttcagcgcccaggccttcgggtagggcgacatggcgcacatatacaccttccgcaggaccagcgaaaggacgccccggaaggccgggatcacggtgccgagttttgattggaggtaactgttgcggccctgattcgattcccccatcatgatgtccacgtaaccctggacacccccctccttcttctcgccgccgaacagctccgggctgttgacatagatttgctgcgaggccgtcacgttcccgctccaggcggttcggtcgcccacgacaatttcctggacggaatcgaccggcccgtgacagatcacgaggtgggcgccaagataatacttgtacccaattgttacactagatttgctgcccacgggccttctccactacttgtagcgccatgtgatcgccggtcgcctccagctcctccgccgggatgccctcgtggacgaagcggccccaatccagcccgtgtcgggcggcgaaggcgcgcatgccgcgggagcagtagcccaaggcgcgggcgtgttcgacccggaccatcaatggctcgttgttcatcacttgccgccgtccgtcttgacgggactgctggacaagtccccgtaccataccacgttcgggctcttcacggtaacggtcccgaacaccaccgggatcggtcgcccaggctccgcggttgggaattggaagtcctccaacgaagcgggtttgggggtggcctgcttcggggcgagggccaccgccgcgtatgccgcgacgatgaagatgatcagatacacagcccattccatgatggggtcctcctcaaaagatcggggtgccgttcatcgggttctttttcgggtagaacggctgacccccgtagttgtccacgttgttgaacttgttgtggcacgtattcagggtgtggtcgcacccgggataggcccggaccgtcgcattggcgggtatcccggccaacgggaggttgagcgtgatcgcctgccccacgtgcgcgacgatgaaccgccgttccaggacccccgccacttcccaatccacgtagcccccggcgaagtagccgtcagcgaaggaggagaaggccggtgacagaaggtcccgccccgagacgcccgtgagggtcgcgtccacccggaaatccgcggaggacttcccgcaagcggccccatacaggacgtgggggcaggtggtctggtacattcggcggagggtcgggcggcgcagcgacgtgaacaccggctccagccgcacttcggcctcgcgctccaggaacttcacattgaccactcgcccgacccacgggacggcgagctgtccgtcaccctcgtggtaacgctggatggtgagctggacgatgtcggtgggcggcgatccgcggaactggtccagaaagctgatgcccttatccatcgtcagcgtcaggttgctccgggacatttcctggttctgctcgaaggccccgcgcttgatctggacggagttgtaagtcactccctccaccaccttgtcttcatccgctgaggtgtagcgccagtattgcgcgccccgggcgaacaggtacaactcgaccgggtaggcttcaaacaggcttcgctcgcgtgcgtcatacgtcatggttgaatctccatcatgcggaccgtacattcaaggacccggttggagttccactgaagttctacacgatccgcgtccaggcgcttcaggcccaggaagctgatttggcggatgcggccggcgttgatgttgatcggtgcgtccagaccgatgaccgccgtgtccgccccggaggccgtcgccgcattgatcgtccgcagcagccacgttccgtcatccaggaggatgccgatgtgggtgcgctccggcgcaaattcgcggtagtcgtcagcatacacctcgatgctctgggtcagctcgccggtctgggcgaccctcatgttgttctcgaaggtcggaacccagaacgggcgcaggcgtcccgcacgccggtgaaggaacttgcggaagttccagatgtcctggagtccctgcagcaagaacttgtaggggcgtccaattcgcgtgtaggtccaaggcgaatagaagctggcccccgccgcggtcccgtagtccacgacatccacccgagcttgaaggctgtccgtcagcgcctcgccgttcttcagcgcctcgtcaaaatacacgtcatacccgaggaactgcgtgggggccgcgggcgggtccaggtcgatgttgtcgctgaactcataggtcatttccagcgaaccgttgtagcccgaggttgcccgcgagacgttgccgacaatccgcccaaggcgcacgggcacgatccatgggttgttgaaggtttcagccagtggtcggttcagcgtcaaagtcccggcggaaacgatacccacgtcagcggtcgcgctcttgcggttggactcccagatcatgatcagtgcgccgtcccggtagtcggaggcggtcgtgtcgatgttgatcacggtcgtgccagccagcagggttccgacctgttgggcctcagaccaaagggcgacggcccaacggcgagtcaaccaaccatataccaggttctccgcccgggccatttcccggtacgggatcggataggtgacgttgaaggactggcggggcttcttgcgcagccgcacccgctgctccgacccgtcattggtcgtgagcacgtccgttttccactccaggacctccttggcgggggcctcgaagatgtacggcagtgcgacgatacgcgagcccaggaccgtcaagttggcgtcatccgccgtcccgtcccagtcgaaacggaagatggcgttgatgtccggcggtccgtccgtggtgacggtcagctgataggtcttggtctccagagctgcccaggtcgcgggcgggacggcccccacaagggaaatgccgccgccgttctgaacctggatgttctggaggtatcggttgttgaaaaagccgttccacacctcgattgcgaactgctgctcactcacgaggttgcccacgttcacgttcgaggggcggatgtggatgcggttgtagtagtcgtccaggaagctaatgccccgccaggacgggaagctgtactcaggctcactgatggggaggttgtcggtcagcggaccatagaccgtcgcggagacttcaggagtcaccaacggaggactttggtcagcccagacgaaggagtccaggccgttcgaccagtccacagacggcccccgcagggtatcaatccccacgaaggcgtgagtggtaatcaccgccatatcaagtcacctttttgtacgctattccacgttgccagctccgtccgcctttctggtaccagggaaacactttccatgtatctggaccaaggctgaactcctccccaggctggtacagggtcatgtccatgtaccgcatccccgggaccaccccgaccggactcaggaactcactgttgcggttcacagagacaatattggggaggagaagcccgaccccgttcagggggttgggcgaatagtcccgcaatactttatcgtgaaccccaccaccttggcaagcctggaacatgtaggtgttcgctgctgaccgcgccgaaccacaccaattgtcgaaggaatcgaactgagcccgcaaaaaggagccgctgttatcgttggtcgtggtgtagtctgcggccctgaaggggacctcctcaagtccgtagttactgttgtcaatttcgttattcagccaggcggtggaccccgtcaatggcgggtgttccccgcccgtagcgtagaagaaccgcccgccgcccggagccgccggattgaacaagtccaacgagccgaagcccaggcgctggaagatggtagatgccacctccagctccaggtagatggtcttgctgtccggcgcaaataggtggtaggacgggaacggcccgaagtagatcggcaggggcaggttagcgtgtccctggtcgccgcccgaggaggacgtgcgcagagggtagccgggctggcgatcccaggcggagcctccggcgtaaccatccgagccgttgatggcgatcccgtagcgacctgaggaacccgaaccgttgatggtgacgttttcattttggtagctgcgcaggttgaaataggctgtacccttgctgaggcaaagttcccgcccggagccagcagccacgtcgcggttcacggtccatccttgagccgcggcgaagtcgcgcagcttgatcaacatgtcgtttggtccggtcgcggacccggtttcataagccattgatcagttctcctcagtccatagacaaggcccagaactcgtggactgagttccggtatgcttgctgaaacaccacgtgggtcttgccgttatagattgtcgtgttctccgcggcgttctgatacccgctgatgctgaaggtcccctccagctccccgaacacctgagcgaagggagcccgctggagtaggacgcagggctgaaggacgtacccgccgcccaagcaatcgcggtaggggagcttgcctgcggtccattggtcgttcatgcagtggggccagacggagcgccagccgctggacggcgagaaggggatgctgtaggattgtgtcggaccgtagatgccttctggctgggctaatccgttgttagggcgattggcaaaataaccccactcaccatctggattcctcaaataaagcgttgcccaacggccttcactgcttggcgaactatccgcgccaggtcccggatacaccccgtggcgccagttcgcgtaggaatagcgccactccgcagaacggacgttgacctgcgggaccaaggaccccccgaccgccagcgggtaggggaactggttgggcgtagcatacggcaggatgaagcccaagtagcccccttcatagctggtcgataccttcacagcgaaccggaaggagcggcccgaggccacgaaccaatagggcatcgcggcgttccacagggggaccatcgggacggcgagcgggtattgagccccgaactggtacagcgcaccgggctggttgaaccaagacatctcatttgcgtcatagccggtgtacccgttcatgaacaggttgtaccagcctgcggcgctgtcatactctgacctgattcccgtgtagatttcatccagaccggagttgcccagggccttcaggatgacctccgagccgaagtggttggccacggttccgtccgcctccagcaggaggagttcggaccaggaaatgttcgttgttccgctttggacggcatcccacaaaatacgccagtgtagatgagcccccggagttccgggaaccgcgaacagccgccgctccccgagggaaaaagcgggtgtgttcgttacggtcaaggcggtagtccaggaagtgccgttgtccgagtattggaggcggaaggaccgcggggcatagctgttgtacgtgccgtttgtcggatgcgacctgatcagcacgttcttgacttcgcgggctgtcctcatttcccacgaattgaagctgacccccacggataggttcgaggtgtagaaagcggcccctgcgccactatcggcggggttgtccgtgttcagagttcgcgggtcataccgaaacgtgtgaatcatcttccgcgaggcggcggcagtagggtccgtcaggttactggtatgggtggcgatgttgtcccggcggacgcgcagcgcctgccaagcctgacccgccgccaccagggtcgcgttcgtggtaagaaaggcgacgatcttgctgaagaagtcctcaaagttcgtcgcggttccgatttcgtttgccatatctcatcctcaaccgttgttcacaacctggcggaccgcgccagcgttgcgttggatcacgttcagcaggacccgctcgcccgaggagctggtcaggtagtcctgcatcaggttcgggtcgatcacgttcacaacccggatcgcggacccactgccctgctgcccctcgccaccgccctgacgcgcttcgtcccgctcctgggtcggagtacggacagacacctgttcgccaggcgtagcacggaaggcgaccagctgcgagtccgtcccgcccgtcccgcccacggtgaagtccccgccgaaggcaaagcccggcgtctgggcgatgatctgggcgacgttcgccgccgccaccgcgccagtcgccgccgcgagggcgtagttggccgggggcggagcggaggcgagggccttctgaaccgccagcacgccgtcgatggtcgcggtggtgatcgccgcggccttaccgatggccgccaacttcttgttctccgaccgggacagcccggacagagtggagaagaagttgcgctgggtggacagattctgctcagtgatctgggcctgaacccgagccttcaattgctgggcggtctgctcgctgatgaggtcggcttgccgcatctcatcaatccgcgcgtacatctgctcatactgcgacaacatcgcctgctgggcttcgaccgtacccgcgagaaggtccgcgttggactccaccaggaactggtttgcctgggcctgcgtgatcgcccccgcggccagcagctcgttgatcgccgtgagctgggcggtgaactcctgctgcggcccgaggatagcctgaaggacctggttgcgggtttccgccgcccgggtttccgcctgaatcagggtcagcttctcgcggagctgcttcagctcctggtccccgaggatgatgccttgatagcgcaggtcctgttcgatgtagcgcaactgctgttcgacctcgcgctgctccgaggtgaggcgcagcagctcgcgctcctcctccagctggcggttgatcgcgcccatcgggtccagggcgtccttcagctgctcctcgatcagcgccaggacctgggccttgcgctccgcggtgatcaggcccgcacgctccgcgttgtcgagcaaggcgagggcgttggcgtactcctgctgggccgcccagacacggtcataggacccgaccagctggttgagttcatcctggagtttcttgagggccttggccgcctcctcatcgcctttcccggaggtccggcgaccgccaccactgccacccaggttcggcgtctcgacttgagccgcggcgacccgctccttggaaatgtcgcgggcgcgttcgatccagctgtccagcatcgcctccaacccgctttcggattgggcgaggacttcctggcggaatccttcctcaaagttcgtcccgatgttggcgcccacggccttccaaccttcgatgttgctggtcaccgcggccttcagtccgtccacgtcaaggtccaccgcggccttcagggcgttcccgagctggcggaagttgttcatgagggcgtcgatgacggagcccacgacactgaggaccccgcgcatcacgccccggatcgtcccgccgatcatgtcgaacacctggaggacggtgcggaccagcttcaaccaccaggcttcctggttctgtacgctggccccggcctggtcggtcatgttctcataggccgtcgccgcggagccggtcagccagttgaagaactccccgaccgtattggcgaggccggtgatgatcgggccgatgtcctcccaggcggcgcgcatcagatcgcccagagtggtcgtgtcgtcaatccccagcttgatttcgtcccggaacagggtcaaggcggtgatcacggaggtgagggcgatcaggaatgcgcccaaggggttcgcggcgatggccgcgttgagggcgaccaccgcggtgcggaccgcgttgaacgcagccgcgcccccggcgacgatagcgaagcccgcgcccaccgacaggaggaccttggcgatggtgtccaggttattgctgatgaacatgatcgccttggacagcagctcgctcgcgccggtcgcctcatcgaacttgccaaccaggtccaccacgttgttctggaggacttggaaggactggccgatggtggggacggacttggcaaaccgttcctccagctccgtccgggcgttcttgaaggcatcgaagatgatgtcagcgctgattttgccctcctgacccatctgccggagttcgccgcgggtcacgttcagctgcttggcgatcacgtctgcgacggtcggcagctgttccaggacggagttcagttcatcgccgcggaggacgcccgaggcgaggccctgggccagctggatcataccagcttgagcctcgcccgcgctcgcgccggacagggcgatggcttggttcagcgacttcgtgaagtcgatcagctcctgctgcgacaggcccaggtccttcgcgctgttggccagtcggctgtacgtctccaccgtaccctccagggactggcgggtggagttcgagacgtcaagcagcgaccgatacaccgccccgaggttctgggcctcaaggcccgtcgcccggagtcggttctggaggttggtgtaggtgtccagcaggcgcacgagttcgcgcgcagacaggtacgcgcccagggaggccagggcgttcttgaggaagtccaccccgcccgcggctcctcgcccggacttgccgatgtcctccaggtttcgctgaacgacacgcgagcctcgttcagtaatgactatgtcaatgcgttcttcggccaccgtcagctccccgggtccccgtcaacaacccttccgaactgtacaacctggacggcttcgagcaccgcctgttccacgaagttcgccggggcttgggcggaatacccgtcattcagtcgttggatgtacgggaggttgttggtgatatgaatctcctccccgtaattgtacccgcgaatgaccgattcagcttggtcgattgcggcctgagtgttggcggcttcggtgctgcctgcctcgccgggcgagtaggcgtcaatcacggaggagggggcggagccaatcgcggcgatccagttggatcgggcgcggcccgtgtccacgggcgtcccggacaccacggcttggtccgcggcgagggcgaccttgcgagtgagagcgtcagcgccctccgcgacctttcggccccggagggtaatgcgtctgctgaactcacttagacttggcacgggctgcgctccactgtagatacttctggtcaagtcgctggatgaaccaaacaaagtcctcctgctgctcgccctcgatcccgttgatcatacaatactccagtatggccaacaatgggataggtcccagtcccgtgccgatttgcctacatgacgtcaggtccaaaaatccgatgtagtacagctccgaaccaagggtcaactccggggcgttctgtatgcggtcgggcaagggcatcccgaaccgcatacactgctcaatgatcttctgctctactgggccttgctcgaagccgtagcagaggacttcccagagtttcccaggtccgtctcccgcacctcatcgcggaacagcgccacgttggcggactgctcgcggaggtccacgaacaggtccggcaggtcctcgaacagcttcaggacgttctccttgttgaagtccatcggctggccgtccgggccttccacgttgatccaatccagcaccaccgtctccgcgaacacttccttgtacaggcggtccgcggtcttgttgtccagcatcccggtctggatggccttcttgtacgggcgggtggccttctccagcgccttcgagaaggcgacgttgtggcccccggcacgcgcgatcttgatgcgaatcggcttgccgtccgccgtttggccgtactccagccagatgccgtccgtttccaggttctcgttggtcttgaacagtttgtacaggctcattctctgtttctccacgtagggtgagggaagggagggccggagccctccccgtgctccgttgattatacgtcagccgcgttcggaaggtaagggaattcattgagcagcagggtgtaacccgccgcgctttccgccgcgtccaccgacaggggcagggtgatcggctggtcctgctccacgttcaggcgtccgtcgcccagggcgagcagcgggatgtcccacaccagaccggcgttgttcttcaccaaggcgaagtccagcgtcacgtccgagttgttgcgcaccgcctggaccgccgcgatgtccgcgaagtaggccgtgacgttgcccgacacctggaaggtgcccgcggaaacgtcgaaggccccgaggacagcgaccgccttgttgggcgagacgttgttgttgatcgtcagcgtcagctccgtgaggaaggcgaacagcgcagtggggttcgagttgcccgcggtcagcaggtgcatcttgatccggctgaagtccgaggaggtgttgaaggccggggcgtccacgagttcaggacgggagcccgacttcacgcccacggagccgtcgcgctgttcgttgtcggtcgccacgaagctcagatcaaccgtgaccttgtcggcctggcgaatctggaggctcagttcattcgggaccgcgcccaccaggtactccgacatggtgccgttggcgtcctggcccagggtacgttcgagctggtaggtgcggcgcttgatcaggttggcatcccgctcgttcttgatcacgttgccgtagaacagctggatggtcttgcccgtgcccgtctccgccaccatggtgccggcggtcttgtcaaactcgatgtaggtggccgcgaccgcgcggacgcgggcgaagccgttgttggcggcgttggtgaacttggtcgccgtcgcgtccccgccgatgaacacccactcgcccaccacaaggcccagggtcgtcaggtccttcgtgccggaggcgcggagcaggcgcggatagctgcccgacacgtcgatgttcatttcagcggagccgaactggaaaccgaccttgatcagcttcgcggtcgccgggggcgtctcatccactgcggtttgagtcaccaccacagtcgtggcagtggagctggcgacgttcttcaagccgttgttcgaggcctgaccaaagccggaggcgagggccagatcaccggcgaggaactgcgaccccaccgtgcccgagcccagggtgtaggtcttgctggtgcccgtcacgccggagaagggcacggcggttccgttggtcgggatgttgctggccttctcgcggatgtccgcgaagaagaagccctgaagcaggcgggtcaggttgttctgggtcaggtcctgaccgaaaccgcccgaggcgtccaggtccgtggtcacgcccttcttgcgctggcgggacgggttgatggggttccgggcgaccgtggtcagctgaccaccaaagtcattgtagccgttgggctccagcggataccacaccggcgacacgggcaggttcttgatcgtgtcctcctccgcatagcgaaggccggtgacgttcgagtcaatcttgttagccatggttgtaactcctcaattcaagtggcaaggggttcatcgcagttcgtcatactcgaactccaccaccacgttcatctggtaccacgcgccgtccgggccaatctcctggatgcgtgcgttgcggaaccaaatgccgctcgcggtgcctcgcccctcgaaggcgtcccgggcgattatcgcgcatttttcagcaagagacaagccttgtcccccagacagcggcgtgaaaacttgtaccgtgatcagtccgggacgggtaaagcggcgaccgccggtgggtccgaaggtcgcctgccgcgaggtcgtgtggcgcaacgtgattcgggcatagggcttgtccgcgggcggggggtcgcccgcgtccaccccgggccattccacgcggatcggagccccgccgttgagggccggggtgtccgtggtccacttcgtgttgaacagcccaaggatttcgtcgcgggcgctgtcaaaggtcgggagggtcattggcgcacctgcaattcatacatgatcgcttgcccgttcgggttcagcggtttcacggcgatgaccttccagacctccaggccccgcagcaccaagccttcgacctccggcggagccgtcaggccctccgcgggcatgaacacgcgctggtcgcccatgcggatcgtctggccgtcgatgtagcgttgctcatagtccaggaacaccgcctcaatggtctggtccgccgcgacgttgccgcccggcttccacggcttcgccggatcgggagcggccccggcggtgaagccccggagggtcacggcctggccgttcttcttgatcagcttcttggccagcgcgatagcggagtcaaaccgtgccatggatcacccccgcagcaacgtgccgccggagcggacaaggcccgcgcggaccagcttctggtccgccgccgggtatttgggcatctggaacacggccccgcccacgaaggtgacggactcgctgatgggtccgaccgcttccgacttcgacaggaccgccacgcccgaggcgttccgctccgggtccgggttcagctccgcggcgagggcgcgcagggcgtactcacagcaggcttccttcacctccggcgggatgtcgttgatgtagtagcggtcacggtcccaggcgtccgtccggggccactccgtggtctggtcacggcccagccgcttcttgcccacgaagttgaaccgctggtccaggtagtcggtcgcgcggatgatcgcggcctcaatctgggggtccgtggagcccgcgaaggagttgccccggtcggtgtggtaggtcttgaactcctccacgctgatgtaggcgttcgccccggcgacggctcccgtgttgtcttggacgatcaaggccatcacgtcctccagaaggcttgatatttggcccggcggatcgtcaggacgttccgcacgtggctccggttgatctcataccagctccggttcccatacccgggctgagggacgcgggacttgaggctggtgcgttctacgtgcccaaaccaacgggccgggtcgcatccgcgggtgttcgagcacaggcggcgatcctgtaggacgcccgccgccccgccgttgtagctggacaggacgaaggcccactggtccgtgaccgtcgcgcccgggttcgcggcgatcctccgccacaggctccggttcatttccacgatggccgtgagctggaagcccgggtcatagcggttctcccaggtccagtcgcggagggaggcgtgggtgttgcgcagttcgttgaacacgttcatgcgttcggagccgtccgggcgataggcgaccgtgacctgaccgaagccgaagccgtattcacgaggggtgcgcagctccgcccgcgggttccagcagcgggagtgagtcaggctgatacagctttcctgctccaccagaccggcgagggtccagggctccggggcttgcggccagacctcccgctgcttctcgactagcactggcgcgtacaccttcgcccccgaagggacgaaggtgcgggcgtcctgggcgagggcgagggagccgaaggcccagcagaggaccgcgaaggcgaagtgaatcaggcttttgcccatagcaccaatcccaagaaggtgaagcagatggtcagggcgacggcgaggaccacgaggcccccggccacggagccctcccgggcatgcgcgagccattccgacaggtccacctggggtagtaccacacgggtgatcacaacggtgatccctgccagcgcgagggcaaacgctgtccactgcgcgagggtcacgaccatggccgggtcgatcagcagcaacgggacgatgctggcgatgagcaggacccaggccgtgaggtccaggaagggggcgaggcgcttgcgcagtcgggcgaggaagcgggtgacggcgatgttcattgttggttctccggttgcggtagggtacacagctggacggcggaccgcgcccaagcctgaagggcggtcagtttcctgatggcccggtcgccgtctgcggcgattccccagagagctgccgaagtctctggcgcaagttcggctgttccggctccatcagctccgccgggggcggactcagccgcaccggatcgggccgcactacaagaggagacttggaggcgcagccgctgattgccagaccgcagatcagcaatagtgcgctcatcccgcgcccgggcgtccgcttgctgttgggcgaactccgcccggaggtttgcgacacgctgttcatgggctttctcctgttcacggttcttgtcgttggcctcagccaggaggcgttcctgctcccgttcccgggcgcggacctcctccttgtatttgtccatggcctccgccgcctccgcggtcgcgtccgccttcccggagccgtagccgaagccgtagcccgcgagggcgatcaaggcgacggcgagcaggacgcccgccgcggcccagaccttggaggaggggaagccgaacacgggtcagaccccgcccttgtccatgcccttgatcggggcggtggggccggacggagccggagcggacttgccgcccatgaccacgttcttcgagttctggccgtgacgcacgccagacttcgaggcattgaccatcttcgaggcggttgccttggttgtgccggatttcgccatgatgtttctccttcggagttggttgggttactgagcggccttcgccttgtcgcgggtatagcccggggcgacggcttccacgtcagcgcgggtgatgccggcggagccatacagcttctccacggcggtcatcgcgggcttcccgtccttggtccagtgggcgtcatccgccgggtccaggcccaggaccgccttctggagcttggtgttcagctccacggtcggctccttcaccggatcggtcaggaccgccggttgtccgtccccatcgggtacacccccggcttgcccggcttcggcttcgacacctccgccgctgacaggtgccgcgtcaccggcttcagtcccgcccccgttgggctgaacgtcgctgtgtaccggctgttggccgtccggctgggagccttcttgaagatcacgctggccatcgggcacctccttcagtgcggggtgtccttccgggtaagcctgccagttgcgttcgaggaagcgggcgtgcagggcgacctcctccggcggagcggtgatggtcaagcggcccttctcgaaggcgtagggctgactgcccaagcgaatcgtgcggcccgcgagggctccggtcaggacaaaggttgtttggatgatggtggacatttgtacagttctccgggtagattaagcaaaaagggcggaccgatccatgaccggcccgcccttcgggtacagcggggcagcgcccgccccgtcgcggggcgagcccttagttgaggatgccgtctgcggcggcaagccccttctcgctgaacagagccaggccgcagtaccacttgacgcgccagatgtgctcatcggagtcctccgactcgcccacgtccacaacctggatgcccgcggcctgggtcgcggtcagaccggcgatgccgtgggtgcgcgaaccgtcatccagcgtaccagcgaagatcgtggtggcgttggtgccggtgcccttggtctggttggtcgggatgtagtcgttgcggaagatcggggtgcccgagtaggccggaacctccgcaccgctgggcagctcgacaacctcgttgatggacgcaccgcccagggcgcggagcagcgccttgtagctgcgcagggtacgcgcgtgcatggtcaggtagtccacctggccgtccttgtccaccacgaggtccatcagctcatccaggatgtcgaagctgaggttggagccgttcgcgccggtggtcgctttctggccggaggcgcacagctggatcaggcccgcgaactcgttgcccgcgccggtgccgttgatcagctggtcctggtacttgcggccagcggacttcgccttggaggcgatctggacagcggtctggtcgttgccgtcgccggagcgggtagcctggatcaggccgttcacttcggcgtcacccatgatggtggtgaggttggagttgaccttggtgaaggtcgcagcggccttaccggcacccgcgccggagaaggtcgtgccgacaccggccatgatgacgtcgccaaggacgttctcgcggttgtacgcgaggctgttgccttcgatggagtcgaagggcagcacgtcgaacatgcggttgacggtgatgatgttctcgatcacgccagcaaccagttcgtcctgggccagcttggcgctttcggcaagggtaacagaagccatgattggccctccttcagaagttgatgactcaagcggttttcagccgtgccggatcacccggtgttccgtcgcggcccgcggaatcactcctgtgggccttcgcctctggctatacaaccaaaagtgacgtcagtatagtaccaagttgcggaaaagggaagccccctggccaaacttgggggcctccccgatccgtcacgcccgaccgcggcccgccttgaactgacccttggcgaggccccgggcgatcttttcgttggcggtcaggaccttgccctgctggcgcggaggcgtctgaccaccacgcggaggcatgccgccgcccgccggggcttccgactcgaacaggcggccatacttctcgttggccttcatttcgctgaccagctcgcggatggtcatgggctggccggtcacgcccgagtaacgctggtcaccctgggcatcgaccacgaacaccttgaattcgccgtcctgctcgaccaccttgacctggttcttgatgaacggcagcaggagttccgggacgcccttcagctccgcgacggcggcagtggcggcgttctcgaccaggagcccatacagctggttctggagggcttcggcgcgggctccggccttcttcaggtccttcgcgtgcgcatcggccagctcctggcgaaccttgtccaggttcagcttggcttcaccgcccttggccagttcgttctggagttcggtcagcttcgcggtaatgttggccttgatttcctccggcgtcgcaccgaagtcagccagcggggtcaggtccacggaggtcttggccttcgcttcggcgcgagcggccttgagggaacggttcaggccagtcacggcctccacgatccccttgtgggcttcgtccgggacgaacttgccatcatcgccctgcttgtagattccccggaactgttccgggaccttgtcgatggaatcgaccggagtgaattcaaagtccataattgtatcctcattgtcagcggatcacccgccagtgttgtgcctcacgcacggttcatattgtagcctcagaaattttcagggtcaaggccagccttgcggaaggcgtccggcttgcgctccgcgagttgggacagggtcagctcgttgccggcccgatccacgaattggtccacgttcagcccgccctcccggaacagcttggccttggtcttgcccaggacctcatcctggaagcccgcgggctgacgcttcaagaagtcctgatatgtggtcgccgccggaaccctgcccacgttctccgcggcccaagccttcctgatgtcctggatcggcttgccctgctccttcgccatccggcggaagtcgatttcacgcttggcgcgggtccgggtatccgtcacggtcgggcgattgcccaggaggcccacgccgtcgatgtaggcgaccatcaccgaccggcagttgaagtgggccgggggcttcgcgtccttgggctggagcagggggatgtccgcgggcaggtcgttgtcgcccacgggggttccgtgaccgtcccgggcgcggcacaccgccgtggtccgaccgtccagcgtgctcacccagaccttcgccgtgatgacgtcgctgttggcgtcccagacgtagccccgcgcggtattggacacgtggttcaccgcggtgcggacgatcccctgggcgtcccgccgggtcatcgacaagatgccgtccgcataggcgttcttgcgcgtcccgaccactcgccgcacgatgtcgtcaatgggctccccgttcgtcatcccgagctgaagggccgtggtcagccgctgctggtccaccgcctccaacgtgctgaaccaatcccggaggaaccggccctggaacgggcgggaggtggcgatggcccggagctggtccgcgttcaccgccatgaagcccacctcaatcgtgatggaggactgtagcaggtcgatttcggcctggccttcgaggacggcgagctgcccgagttcgtcccgcaccagggtcttgtactccgcgagggccgcggcccgggctccgcggatgtccgtgagcagagccttccagcgttcgccggtgaagtccaggtcacggccctcgaagcgggcgagccgggtgcgcaggcgttcggtcaggtcgcggtccgcctcctccaggagacgggcgacccgcttggtcacgcccgcgctgtagcggcgcaggtcgatttggtgacgcagcgcggcgtcccggtactcctcattgaatgtgggcatcccgcttctccatttctttgggtccgttcatgccgaagtggatacacgccccgatcagcggcccgaggacgatgctcaggaggagccaaagccccaagaattgccagatgttcatgactcgcctccaggattttcaccaccttcgcccccaccctcaccaccttcgggcgggttcttctgggccgggtccaggtccaagccagcgcggcccatcgcctcgctgatttcctccatcaactcctcccagtcctcatcctcatcgaagtcctccgggaggaccccgcgcaggcggaggccgttcaggtaggtcttgcggctgatgtcgcgcttctcgcgtgcgacttggagggcctgaaggcccggggcgtccatttcctccaggtcatagtccttcaccagctccacggtgccgccgttcggcccgaggcggagccagtccgcggtgatgtccagggcctgggccagggcgtcctcgaacagcccagtcatcgcgctcaggtcgctggtcgcctccgcgctgtccagcgcccgggcggtcgccgtctgcccgccggtcttgcgcttcaggaactccgcgccatagcccgccatctgctcctcaaggtccttgaggtccgtgcggcccgcggcgatggcttggccggtgtgctccacgtagtagaaccggcccgccgggtccgggttgtacagcaccttgttcggccctaccaccaccgggtccgagtcctccccagacgcccccgagcaggcgaggatcgggaagcgggagacggtgaggatgtggcgttggtcggaggcggactgccagtgcgccacgttgaggtgagccaggtccaggagcgggggcttgcccatcatgaagccttggcggtccgcgtagaaggtgaccagcgggacgtagttcagccccgtcgcccactcatccaccagcgcccactcctccttctgggcgttggacttcttcaccggctcccagagctggacaaggcccggctccaggacgcggatgcggcgcttgcagacctccgcgaagccgtcctgctccatgtagtgttcgatgatgcggacgtgctggaggacttcgaccccgttgatcacctccgaccgggcgaacagcaggcactccggcttgatcatcacccagtacgggcgcaggccctcccggcggtcatccgccagggtccggggttggccgtcctcccgcggggccgggcggggcatgtcgatgaggacgtggcagagggccttggccatgccttcgcggaaccactgacgggcgaacacgtccaggttgttcccctggaggtccacgtcagtcaggatcgtctcctcaatcgccttgggcacgtcctcgttgagcttgatcggctcgctgaagggcttgccgctcagggtgtccagcgtctgttcgaccatgttgaggaggacggcggaggccaggcgctcctgatagcccttgtccgtctcctcctggtggcggggcaggtacgtctcgcccgcctcgcgcattgcttcggtcccgcccagcagcgtctcgatgacgtgccagcgcgggagcatctggtcatacgccccgctggtcgtggcggggctctttgggtctttgtcggccatggtcggttctcctggttcgcggattctcgcccgaaggcgaggacccggcaagttgtattacatgttgccctgcttgacgccacgcagcttcttgcgcacgcggtagcggatcgcgtcaccaatgtggtcctccgcctccgtgttcacgtcatccaggtccttgtcgtcgcggggcagcacaggaaccgtctcaatggtctgctgacaccagtcgaagatgaacagcccagggacctcgcgcggtcccccgcccgccggaggcagcgcccccttgagcagcttgcggatttgctcccagccctgcttgcgcgagcctgggcccttgtccgcgggcgtccagcgcacgcccttcttctccatgtccacggcgatgctgttgccgttctccacgtcgaagatggaggagtcagcggggccgggcttgacccgaccttccagcgcccagtcctcctcccggtccttcaccccttgggcgacttcggaggcgagcatgcggacgccctcgttgcgcgttccgttccagccataccactcctggatcatgtacagatcgcccctcaccttcccatacacgcggccattccactcgaacggctccccattcgactccgcccaccataggacggcgaagggcttggagctgccccagtcgaagctgcggtcaatcttccaccgcttcgggatcaccgacagcgggacggagggcaccacgtgtacgtccccgcggtagatgtcgtcaaacatccctcccgcgatgatgtcccaggagccgtggagccaggcggcgagttcggaggggttccgggccgcggctcgaatcttgctgatgtactccgggtcagcgtggagcaggatttggttctcatagatggacccgtggatggcgacccggggcggttcacgctcgccgtctcgcatcgcgtccaggatcacccgaccgcgcatgtgggggaggcggaagcgggccttgacccagttgtggccggggccgtaggggttggtggtcgcccggtagcagcggggcatccccggcttcgtggagcggcagcaggacatcatgacggtgtagcacttgtcatcggcccagttgcagagttcttcccagccaatccacggataggcgtggccgtggtagttccaataatcctccggcgacttcatgtggcgcagcagcagctcctcgccgtccgggaaggtccacttgtgctccaccttgttgtacttggcccccgggaagatgcgcttgaaccacttgttggtcttgttgatcacgtccgacaactgggggtaggtctgacggaacaagatgccgcgccactccgacccatagcccttccccacgtgctggaggaagtccatcagcaggcagtcggtcttgcccgggccgcgcgtcccctcatacagcacctcgaagatcggatgcgccatgaggaaggccagctgcgacccgtactgcgggcaccaggtcgcctccgactccttccccgtctccgggtccacgtagtagccccgcagctcgccgggctccgcctcgcgccactcaatcgggtagtccgggcgggcggcgatggcgaccgccttgctcacttcggtctgggcaaacatcagctgccctccccggtcggacggcccacggtcccgcgggcgaggtccccaaactggttctgccactcgttgatcgtggccggagcccccgggacgatgagcacgcccccgcccgatccgctctggctcatgcccgatccgtccttgtccttgaactccggcttgtgggcgcggagcatcgccagcatcatcgaatcgctgtacaccttctcatatgtgatgatctcatccttgaacttcccgccgatgatcgggcgctccacgccgtcccgcgcccgcttcagggccggggcaaacatgttctcgtcaatgaaggcttgcagcgcgtcctcgaaggcttcggcaaactccgggtcacgcttcagatgatcatacaaagtggtgatggagacgcccaccgcctccgcgcaaagggcgcggcaccccttcaactccgggtgcgaccggaacaggtccaggaactgctgcttgcggtccgaggtgaagggcaccatcggcttccgctgaagtttctcaatcgggcgcatcacgctcccctctcagtgtactgttggtcaatcgcgcatcacgcggcgatccgtccccggcctcacgcccaaggacatccttgccgcgagtatagcgtgaggttgtacattagccaagggcgagggtcgcgcccgcgggagtcgatgagcccaggtgtatgctggagcggattgcccaagcaggcacgcggcgtcctccgcttaggttcgaggggtcgcgcttcacttccacgtccgaagaagtaaaaagtcaagcgggcaaaaagtccatataaaacagccctttatagatagatagatagatagatacttaacttgcttaacttacttaccttagccccctgggagcccttcggacaccagaaagcctcaacaaggattctcttgggccggtccgccgggtcgatttgtcgggcgaatttatttcaggtaagaatcccaagtaacctaagcgcaaggtgcgggaaccccagacgggcttgacttcccgccacgccttgcttcatactttttcggagctgaacccaagcgcactcccgtaacccaagcgcacccggtcgaagtggagaagggggagggagccccgccggttttcccgcagccttcggcctcctgtagtgaagtcggcaccattgccgcccggcggggcattgatcgtgaggggcggtcaggcccgcttccctcgttgaaggaaccagtccaaggcggcgcagatcgcggggttgtcccaccactcgtcaatcatgcggcgtgccgcccggtcgcggaagaaggttggcccgcagtagttgtgccactccatgaacacgcaggagccgtccgcgaggcggagccggaagaagggcgacaggcagacgatgccgcccgggatgcgcatacaggtcacgtcccgcctcctccggccttcgccgcgagggcggcgttgaaccgttccgcgaaggcgatgccgttgacatgggccgggtccgcctcatcgctcatcaggtgtcgggcggcgagttccgcgaggaggtccgccgggtcgcatccgtccgcgacggcgtgttgaagggcttggtccaggcgttcgaggtgtaggtgcttcatcacaggaccctcgtgatgcccaggaccttccgaccgaaccagcccacgtactcctctgtccaatcgtccagggagcgttggaactcgctgaggatgtggcggtgatcgtccgggtgtagggtcctgacaacgtagtattccaggtgctccgcccgccagcccagggtcacttcgaggtagcggcccgcggcggggtcgtggaccaggtagtgtaggatgggctcgccgccgtcaatgtagatcgtctccaccacggccagcttctcctccgggtggcggcggacgtactccacgcagttctcgtggcagcggaagttgaacatgccttggaccggctccggcttcaccatcgtgaagcgggcgcggaggcggcggcagatgcggtcttgggctcgcttgagcaggcgttgcttcatcagcggtcctccatgtagtcgaacacttgttggtcaatccgctcgcggtccgcctccgtcatcttgcgctccagccagggggcggggcgtccgcggcggtcgcggacttcccattcaccgcatccgccttccgccgggtagcagtattcaggcgggccgctaaccttcgcgggcacgtagggttcccagtaggtgaccacgatgaggcagggaatgccgctgatgcgcgactcgatttcagccagctccatcgtctcacctccccgggatcgccgggagccggacccagtgatcagtcccggcttcgttgtcgcagagtcgccacagcgtgccgtcctcgcactcgacaaccacttggcggaccaggtagccgtcgcgggtcgtgcccacggaggaggtcatggaccgcacacggcggtcgggtggggtgttgggcgggttcatgctccgccctccttcgcccagggacagttcggggccgtgtggccttcccctccgcacagggtgcaagccttcagggccgcgcggacttcgcccgggacctcgttgagcagttggatcgcgttggcgtccagggcgctcgcgccccagttgaacttcggcagggcctcctcgaacaggcgagcggcccgggcgagggtcgcctggttcgtggtcgcggcgttcagggcgcgggcgaccgcgtgggcttcctcctcgctgaacgtctcgcagatcgcatcgaacagaccttgcgaagcatacacggggtggggcttgagggtgtccaccacggtgtagtcgaagcagcagtggccggattgggacccgaccaggaccttgtagcgtccgctcatccttcacctcccggggcgttgctcagggcttcgtccagctcgcggcggtcgatggtcaccccgacctcctccagcatgtccgcggcgagttcgaggagggacgcccgggcgcgggcttccgatccgcccagggggtcgttcacgtgttccgcgcagtcgcggaggtcgttgagggtgttctcccaacgacagtagctcatgttggccatggcgggctccttttctacaaggttacaagatgatctgcttgaccatcgtcagcaggcggtcgaagtcgcgggtgaagtgggtgatcttcaggccggacttgttcgggtggtagcacaggccctccggggtcgccatttcagcgtagtggatggagtggatcaggttccagctcagggtcgccgggttccagacttccgcccgggcgaaggactggaacttgtagctgtcggacttgatcgtgaggcgcaccttgaagtcgcccagggacaggatgcggcgggcggtcacgtcctggcgaccttcgttgatggtctcctccaggaggttggtcttgggggcggtcttggtcatggttttgctccttttctgggaagttcggggcggatcggctccgccccgaggggttggtcagtcgatggcggcgatgatttcctcagcctccgggtggtcgaaggcgaagtcacgcagcttgtagaacaggtccacgaagtcctcgcgctggggtacttccagcagagggcgttgaacacgaacaggcaggtgatcaggcccgcggcgtctccgctgacctcgcccgagtagccgttggtgtccacggtcagtcgcagcttccggttctcaatcgccggggccaggtacatcgcgccgttggacagcttgtacatgtaccagtacgcgccgttgtactcctcgcacatcttctggaggtggctgtacagggccatttcgacccggaggaagtctgcgccaaagaaggtcgggaggatttcgaggcgctgctcatcgttgtcgatgcgggcggcggtgatcttgctcatgttgcgtgctccatttctgttgtggccgggaccgtcccgacctgaaagaagtatagtgggggcctccgaagaagtaaagccccggaggtcgatcaatcgacccacgggggtcggagtcctcgcgcggcacgaaggccggaccgctcccgcctcgctttgtcgtgtctcaggtcgcggtccgcctcgcacaacgtcgcgcccgtcccgaagctgaagccggggaacgcggcgcggaccttctccaggcggtcggccagctcctcccggttcccgttgaccaccacgaactcatcgcccgcgatccgaaacacggcgtcaggcccgaaggcgaggaccagccgccccgccagctcctgaagggcttgatccccggcgcggtggccgtgggtgtcgttgacccacttcagcgagtccaggtcaaccagcgcgatagcgtccgtctggacttcctcgaaggcgcggcggttcaggaccccagtgagggggtcctggtacagagcgttgtacaactccacttcactcatcccgcggagccggtccagcaaggcaggtctcactgacccacctccgcgatcctctggaggacggtttgggcctgacccttgtagtcagagtgctccttgacggtccccttgatcgtcagttcctcgccctcctccggggcgaaggccgtggacttgctcaggagacaggccccggtcgccttgtccaccatcgtcacgatatacacccgctccagtcggtagctcatgtatgcttcgcggtcgaaccaccgcacgcgggtcacgatcacatcgaaggtgagccgcttcttgggctcgcccacggtcagggtcgggtgcggatcgggcaggagcaggtccgcgcaacggcgggcgacttcctccgcggtcaggcgcatcaggctcccgtcctcgaagtcatccagggtcttggcgagccaggtcaggtagccgcgcggggccttctcgaactccttgagctcatacggcccgaaggcgaacttgccgcccaggatcagggcgcgcttcgcctcctcccgctggcggcgctcctcctcccaggcttcctcccgctcacgggccgcgcgttcccggcgctccatctcctccgcgttcgcacgctggatgtcgcgcatctgctccgtgagctgttcacgggtggtgttcagcgcgatcaagttgcgctccgcgaaggcgcgggccttctcgaacgcctcgtcagcgtcctggctcaggttgaagtggtggaagctgcgcacctccgtgtagcggcgaccactcacgtagtattcatggaggtaggtttcacgcagggtgaagaaagcgccggtttcaccaacgccaatgtaaaggtgcgggacgaagctgctcatcacaccacctccgcggtgtcttcaacgcgggcggaggtcttgaagcgcccgtcctccgacacgccggtgaccacggggacggtgccgcccaggatcgcttcgaccttcgcggcgacgaacacggtggtgcgaccgatcaagcggaagcggtcgcccaccttcaggctttcgttgattttcagttcgcggcgcgagccgtcaactacgttggtcagggtcacggttttcatttcagttctccatttctacaagttgctgtacgtgagaagaagtatagtgccaatcacccgaagaagtaaagccccagaacaaacttttttcgatcccaggaggagggagggccggagccctcccgcttcgcctcacttgccttcggcttcccgggccttcgcctcagcggcggcgatgatgatagacagcggggtcagggtgccgttcaggtagtagaaggcgcggaggaaggtggtgccatgctggttggtcacgtagtggacgttggcgtggaccgggagcccgccgaagatgtcgtggaggcggagggcgttgttgtactgctcctggcgcagctccatcaggtcgcggatggacttggtcacggcttcgatcttggcggtgtcgctggcgcgttcgaccttcaccaccggggcggccttcacggcggcgcggaaggtcaccagggcttcgatctgggcgacggtcgcggcggtctgcgggaacacgcggagggcgagggcggagtgcttggccttccagttgtgggggtagtcggccaggttccagtacacgtcatcatgatccgcggtgcgggcgtcccggtcgatgtccaggaccaggccggtgatgtcgcgcttcagcagctcgaaggcgctgttgaggtcgcggagggcttcttgttgagcggccttggaggtgaaaccagcctcgaagcgggcggtggcgcggtcgatgtagaaggaagcggtgcgggccatggtgttctccatttctgaggttgccgttcttgttgaacgtgaagaaagtatagtgggggctcccgaagaagtaaagccccctcatacaactttcttcgattcacggcaacttgtggcggtcccgacagggcgcacagactcctcccaccagtctcccgctccattcgccacacaggtcacagtcgcccggctccccgggcggtatcttcgccgcggcctccgcgatccgggccacttcgcggtccgtgtcgtggaggatgcggtcattgctcaagtcgatttcgtcagccaatcttgggttctccttcagggttgccccggaggacgttcagggcgctcatgaggcagatgatctggcggcggcagtcctccaggctggtgtgaacggcttgcgtcccctccggcttcgaccagccccgctccttcgccaggtcatacacggtgcgggtgtcccgggccatggagtatccccagggaatcgggacgcccgcccggcgatagtaaccctcaagaatggcgacgtcaaaggacggcccctgggcccagacccgcttcaggtccgggtacttgcccaaccagcgggcgaggtcggtcagcgcggagcgcatcgccttcggcgggcgcttgggctggagtccgccccggtcccgccagaactggaccgtggaggcatcgacctcgccgcccagcatcagggcgctgtggaggtccacgtcctcctcgaacaggtccggcttcaccaatccggttcggctgttgaacgggatcgccccgacctgaatgaccccggcgttggggccggtcgccatcgtctccaggtcaatcatcacgctgtccatcgtgttgtcgtcactcatgtcacttctccttcttcagtttgatctcattgaatcgtacaaactcttgccacacggggcattcctggaccgactcgccgccctccaccacttcacagtagggcacggcctccgtccggttgaggcagttacagtggcggcagtcgccggtcccatagtgcgactcccactgctccacggcgatgaagtagcccgagcagcgaccgcctccgaagcggtgcgggaaccgataggccccgcaggtgcagacgtactccccgcggcggggtttccggcgggccatcagcggaattgataggggtcgcggtggggttcgcccaggtcaaggagcggtccgcggcgatccggtccgctgatgtagctgaccccgacctgtccgacccgctcatggacctcgttgcgcactcccggcagcggcggttcgccttccgtcacgcggtcgatgtacccttgggcacgggccaggttcagctccgaccggcggcgggcgtcccgctccgcctccagctccttgcggaacacctcccgctccttgtccagcgaccggcgggcctcgttgcgctcgccttcgaggcgtccggcgatcccctccagctccgcgatccgggccgcggccttgtccagagcggcttggaggttcgaggcgacgatgtcccgggccttgagctggtgatccagccattcgcggaaggtcgccccgaggacggagggctgaccgtccgctccgtcgccgcggttgtacaacatcatggcgaagttgccgatgtccacggggtcgcccttctccaggtgatccagcagcatcaccgcgagggtgtccagttgacactggtcggggtcgtgccaaccgccccggccctccgcccgcttcttctccagcttgcggcgcatcgcgtccgcgaagtcagccacgccttggttgtcgatgaactcagcagcggcgtccgtcatgtcgatatgttccatgtttgttctccgtttctgtcgggttgtcaatcttcgtcaggcagtcgccattcgtccttcttcaccttcttcatcttcgccttgcccaaccagttcgaggaggcgaggtggagggcgtagtcatgacacaccacctgcccgtcgatcaggccgaagttctccggcttcaggtcggtgaagaagtcgggcagctccttcggcagttcgccgtggggcaggggtcgcgtccgctcctggatcaggacgataccacaggggctgatgcggcgacacggggcgaaccagcgcgcccagggggtgaattggacctcgtgccacatctgccattccgcgacattctggaaggactgcgcggtggtttcgaccttagccacaagggcggtttgtccgtggagggcatacacctggcgggcgactccgaaccccaggcggtcgcccaagaaggtcctgatgaagtcgtttttcaccacgctgccccactgttcatgatcaagttccaaggggtgtttctccggtaggggttgttggtcgaagcccggggccatcatcccgggccaggtgatcggtcccgactccggcggcggggcggcgggcgtccgcctgaacaggctccgcagccagctcagaactcgctcatgatccatattctcactccttcggtcttgcgcatcttgaaacggaggttcttggcctcctgacaggcgcgggcgtagcccgtcaccttcttggtttgaagggaacctcccgggacgatccagcacagctcccaatcccggttctccttcaagttccggccctcatcttgtccaccgtctccttgcccaggacccgctccagctcctcccaggaggtcgccgcagagccgtcgccggtcgggatgccttgggccttctcgcgctggtccacgatagcctccaccatcgcctgacggaacagggcgaaggcgagaaggcggaggcccccgtggatcgccgcgtcaaggttcaccggcggcacccgctccgccttgggcttgtacgtcccgttggggcgcttgtttgggtcttggttcatggcgtcagccctccttcacgcagaggtcgatgattagcaggttgaagcggtccgggtcgcgctcctcgcggatcgcctcccagtgcccgccttcgatccggcgcagctccaggcggtagttccccggctcgcccaggaaggcgagctggtgtgcttccccggtccacagcgcccgctccgggtaggtgagctgggcgggggagtccttcacgatgttcccgcccaggccccgtccgtggagttcgctcaggaagtcgcccacgtaggcttcgacttggtcaaatggtatcatggtcagtcctcgaaggccccgcgggcggtttggcgttgaatctctgcgaagtggcgcacgaggcgagcccggcggaactccacctggcgggcgaccggggtgccattcagaacttcgtccgcggtgtggcgcccatacacgctgtccaggtagttgcggacctcctccggcttcgcggaggggatcgcggcggcaatcgcctcgaaggccacggcccaagccttgcgcgcggcctcctcgcccttcttcagggcgtaggttccgaagaagccatggcccgggttgttggtctcgatcatcaattgtctccgtgttgatcagggtttgtcgtcatccggcttcgggaggagggcgagcagcgcccggcgtctccaccacgggagttccttcagctggagcggtcgcggtccgggaatcgccagggcgggcgatccgaaacgatgcgccagcgtgtcaaaatggcggcgcagatcggcttccaggtagtcctccacaaaatactcccggcgctggacgcggcaccggacccgctccgaggcaaggacgccccgggcgatgaccaggaactcctcccagtccgcgaccggaaggcgttgccggtactcctcgaacagaacggccagggccgcttcgtccaggtctttcacagctgacctccgtgtagttccccgaggcgctgattcagccacgcgacctccttgggcaggagctgttcctggtggtccacgaggtagcgcaggcggcgcaactgttcctggttctcgttggacagcttcgccacgttgctttcgaggcgcttcagcttcgcgggtacgtccttggcgagttccgccatcagccggcactcctccccgaaggcgcggagggcgtcccgggacgc

SEQ ID NO: 26 - DNA, 45073 bp, Pbunavirus EPa39
  source 1..45073: mol_type = genomic DNA; note = EPa39
gcccggaagttatcgaggcgaaagcccgcttcgcggccgaggcggagcagcaaggaatgtccaccaaggaatatgctgagctgcagagtcaagaaagaatgctcgcagggacgctgttggcgtttgtagcattcttgttcattttcagcaccatgctaccaaggctttgaataggcctgggtagaccacaaaccccagccaaaagagaatcaccatgaagaaagaaccgattcacctcagctctatggcctcggcccgcgccatcgatgcggaattcgcattccggatggacgagttcatggcgcgtgtagcgaaagagcacgaagcgctcgccgctcgcctgaatgccgagaatgaagcgctctggggcgaaatccgcgctgtcgccggcctgagcgccaccgacttcccgaacatcgccatggcgcacgacacttccgatgggaagctctatgtcatggacgccgacgagttggaacgcgtccgccaggcctgcccgtgcccggactgcgcatctgctcgcgcagaaagaatgccgtcgcaagccagtggagggattcactaatggctctgaagctatcttccgttcacgttcgaatcgacgggcctgacggaaaggttctgtcggaaggccgcgcagagttctccggaactgcattttggatcgctgcgcagcgcgaaatgcagctaaggcacctcgtcggaacttcctttgaaggtgctcttacctatttggccgacaacggctacaacgtaacattcagcaaaggtgaaaagcgatgatcgaaagacatgtagtggatgcggaagtggtcgagcggattcgttctcttcgcatgcgactcaacgtcctggacgaaaccctgcaacgggccgtcgacatggcgatgctcagccaccagaaatctctgcaagaccttcggacctatgaagctcagctctgggatgcgctcaatgcccgttacggcctgtccgttgagaagacctatgacctgcgtttcgagggcgaagaagccgtgctggtcgaggttccgcccggcgacggccaaggtgatgacttcatcgtcgagtcggaagccgaagcgctagcggccggtcaggcagctctggaagtcggcgaggccgctgcatcgacactcagtgccaggaaccgcaccgagtaagacccgaagcccggagcgatccgggcttttctgtgtttagaagtcgaagaagcctttgggcttccggatcggcagaatggccgacatgatcaccgagtcggcgatgttcggcgacttgatcttgcgcttctcgcgcatatccttcttggactcgactttgaaccggccgttcatatccaagtctttgcgcggcgaggaaagttcgatacatagctgatttagtttgtccgggtgaatcgtttcagagttgatcgaaatcaattcgtcgaatggataaacctttccatgcacaaccgcctcataagtcttccggaatctggtcgcgacttcttcccacttttgcgccttgatgttgctaaagtgatctttgttcttgatcgtcgtgtgcggcagcttcatgtaaatatcatcaggcttatctacagcgccgcctgcgttgaatggatcataggtcagtttgaagtctgggctggagtcattcaattcggcgaacttcgacccgacgtgagcgccgacgccgatggagtcataagtgacagaggcgcctttcatcttcgccagattgtaaacgcgactggacgacttaagcagctcatcttccagaccatcccattcgtcaacttccatgatgacgttgccgtgcatgagagtcgtggcgttcgcatcctcaccgtcatccgcaacgtcgaagccgatgcgcttcgacccggccggctcccagccgagttttttgtgggcatcaatggccgcgaggatgaacttgaggttgatgacggatttgtcgccgcccgtcttcggaatgcctccatagatgtgttcggcctggtccttgtcgcgctcataagcttcgtgaatgaccttgagcatcgtctcactgagaaacggattttcgttccagttgatcatcttgacgaaggcgtctttgggtggcttcaccacgaagttctgatacacaaagtctgtcacttcgttcgggttgaagatgatccagatttctgagttctctttccgaatggtcggctcaatgacttcccactgttcctgggtaaggtagtgagcttcctcaagccagagaatgtcaatgccttcggtagacttgatttccgacaggttacgggcgatcccatagaataagaattctgatccggtcctcttgtgcttgatcgagttcttcgtgaagatgaactcgccgttgtactcagaattctcaatcttgtccttgatcaacgtgtagaccgattcgctgatgcggttctggaactggcgagcacagaggaacttgagtctataattggccgcgaggtaaacggctataccgccagcgtcgtgcgacttcgaagacgcccggccgccatagatgactttgtaacgggcgcgagttcgccagaccgctcgcagtgcaggattgagtttatacattttaattagtccattattcgcaataggccgagtatatcgacaccgcagcagacagtcgagcacaaccgttcgtcggcgtacatgaattttctcaactagacactttacttccattctgaccaactgcataatctcttcatcgaaacgaacgaatgacttgtacgcactgatgctagtgatagctatccaaaggagattcccatgagtgaacgtctgcgccgattagaagccgagtatgaacgcatcgaaagggagtggggcggtctggcccggtatgagctggaaatgctaaggatcgaaatcgactccgaaaagagacaatccgaagtcaacggatacctatcagtcttcggatgcggacacgccttccatggtaggaaatattcctgacgaacagaccgctcgtcaactttgagaaatatttcacaattctgctttacttccattctgaatagcgtcataatctcttcatcgaaacgcgaaacactccaaaacagaggaacgcagaaatgaccaaatcccagatcaacgatcaaatccgctccgccaagatcgccatcagcgaggcagaaatggaaggcctgcgcggccaggctatgatcgccctgaaagctaagctgaccaacctcaaagctcagtacaaactcgccaaataagggtcagaaaatgactaagcagatcaatatcggcgtcagcaacttcgacgaagctttcatccagcacataatcggcggcggtttcctcttcgatgtcgacgactatgaagttgcagaccgcatcctgctgaatgtggatggcgaaccggctatccagttcgaactgaatgccgaactgtggaacgaagagactctgggcattccgatggacatcgacagtgacgagttcgccgatgagcttcaagattgggtcgagtctaaggtcaatttcgccttcgaagagtggctgagcgcggactaaggcgaagagtaatcatcaggcgcggcaggttggtcgcgccattcacaggagaattgtcgtgtccaagctaatccctttcaacagcatcgacggtgacgtcaagttcaagctcgaagtcgtagatgaagcagaaatcgtcctggtggatgtaagcgtcagcgcctcccagtttcgaaagttctggccgacagcagatagcctctgctgggacgaagagaaggccgagttcgttcctcgatacaaatcttcttacttgcagggcgctactgagttttccaatcgcgccctcctggcgttcgccgctggacagtattatcttcgggccgatcagggacggaaagacgaatccgaaggcgtgacttctgatgaaagcctgacggccatggagcttgatagggagaactcgcgtctggacgaatgcctgcaaaactccatcgctcgcgaagacaagacggccgaggtgaatcgccagcttcaactcagaatcagagatttggaggccgaagttgaatcaaagaactcggccatcaaggggcatcaaagaagaatcgacgaactgctgaagcactcgcagaacttgtccgcgcagaacgtcgaattttcgctggagctggagtccaagaagactcttctggaagcactcgacaagagcctggaaaccctcatggccgacaaagacaggctcgaaacagcagcgaaatcggccatcgatctggaaaacaaagctgccgaaacgaatagccagctcgcccttcgaatccgcgagctggagaccgagctggagtcccaaaaggcgctccgggaagagtctgacagaagcctggacggaagcatcgccaatgccaacaatcaatacaagttggcttgcgaagcgcgcgaagcattgtcgcgggcgcgcgaagatgccgaattctatcgcatcggcatgcaaaggatcgcggaaattgcgagccgtaaacctttcgaggactgctgatcgtgcagaaatattgcatgtaccatatccctcggcccggaacgctccagttcgaattcgaacggatcgccagttccaaactcggcatcaatgacggctgcctgtcactgtcatccgatggcgagcgctatctgaacgatcacattgactggctctggcgacaattcctggcttccagaaatttcagataattctctcaaaagtgctttactcgatgaggtggctgaggtatagtcacctcatcgagtgaataaaccaaagaggtgtgagatgactaaagccgagcaactccttaaagcccgtctggaagacatcgccaatgcggcagtacgtcgtgagcgcctggactgggccacagcctatactttcgacgatggaagctccattcagtgccgcaagctgtcgggtcgctcggccttcgcccgcaacgggtggagactcggctcaatcgactgaccaaatcgtccggcctcctgaccttacagaatatcaaataatttcgcagaagtgctttactcgatgaggcgacttagatatagtcacctcatcgaaacgcgaacgtccaaaagaggattgcgaaatgacatctcaattcgacgcctacgaacggcgaatcatcgaactccagaccctttccaaatatcgtcgcgccggtgggaagttcgcgccggttgacggcacccagaccggaccatggggtccggtggacaacgaactttgggcgaagcttgaggccgaagtcgaagctatatacaccagcaaacgggagcgcaaagcatgatcaagcaagacctgtataagcagatcgccttcgcggcggtaggctccggcatcaagatgttcgtcaagctgtactgcaatgacaccatcttggaagtcattggcgtagaagaagtcaaaatcgacggcgcgactcgtctgcgttacaccggccgcgcagatggtgtcgacgtgcacttcttcatcaacgaaatcgacatggtgatggtatgagctatgcaatgttcgatttctacatcgaagatcacgggcatgccggaatggaaatagacccaggctcattctatgttggatttagcttcggtcgggatgccatgttctatctggcatacatcgatggagcatgggtgtctgaaatgaacaaatggcttccagaacctaaacaagagggtcaccatgaacaagtccagtaagctgccgagcggctgggcacaacccggcgctgctcgaaaagttcacttcttcatggcggacggtcgaagcctatgtaaacgctggctgtacttcggcaagacctataacgagattcctgccctggaaatcacctgtgccgtctgcgagaagaaaaggcagagtcctttcgagaagttctgcgacgaaattctttgaagttgaaccctacataaaggaacaatcatgaaactctaccaggccacagtcagtcctccgaccttctatcgccacaaccagaccgacgaagagcggaaggcgctggaggcggaatacatcagcaaattccatgttctcctggggaacatggaaggcgtaaccatcggaactcccggcgagcgtgactgggagccgtccagttggagtaataacgtcccggtggtgtgcagcgaaatcggcttaggccgcctgacggcttcggcctgggatttggatagcaactatccgtactcaatcaccaatctggttctgctctgggacgacgttgacccggaagccgctctgcgacccatgctggagcgtctggaactggccgcgagccggttggccggtatgtccgtaagctacatcaaccaaccggagattgtgagcggaatcgagggttggaattcgctcaccagttcggccatccctggtccaaacctccagaacgtcaatcgtctgctgctcaaggaagactgctgcacggacgaactccagcatgccctggacgcaggatggcgccttctcgccgtatgtccgcaggaagcgcgtcggcccgactacatcctgggtcgattcgatccgactccaccgaccggtccccgtggcgctgccaggagtatagaaggatgacgatggtggggccggcaggcaagcgctattggctccgatatgagaccagatactgggagtgtcttgacggacaaactctgcgtctggtcttcgtcatcaatggtcgccggtacgaagtcaatcgacgagtcaatgtcgacattctggccagtcggcgcaggttcgagtctttcggccgagtcctggcaaggatggaaatcagcttgtggttcgcagtgtgcgagcgagaagggccatggcgcggtagcgtagccataagcgatacctcgctttggttccacctgacgggagaattgatacacaaatgctttactcggcggtgagaatcagggcataatctcttcaccggctgagaagtcggacccaaagtccaaaaaggaatctaggaatgtacagaactccctcgtccaagttcacgttcatctgcaacggcctcgcccagaatactgaagtcacggtcctgctccggacgcagaaaccggaggacgtatgggtggtggacgaagctccatccgctgacctgatccgcattcacgaacgcagcaacaaacgccgtcgccgtaccatcaaaatcatcgacgtggactctgtatccatccttcataaacgttaatccatcggcgcggtcgggattgtcctggccgcgccttcccacgggaggttgtgatggcaaatattttgttggcttgcgcattgacggtcggcgatgaaatactcacccatgtggacgacagtgaccccattcggcgtcgagccatagtcctgcgcgccagtcctgctccgcacaacaaagtaagtgtcggattgtcagcacttgtcggcggtgagtggaaggatttcgggattaaactcagaagtgactacccaaccatcatctggaactcaatcgcataggagaacgacatggcaaaaagtagtaagggtggacgagcttaaaacaggcgacgagattctgattaaactcagacccgactcagcagcaagaaacagggccatcatcctgtcggtcgaactctggcatggtgaagtaactctggagttgacttgtccggtcggcgactactgggaagattggatcggtaaatacgtctcatcaaccaaagtcgtcctgatgaagcgcgactaacaactagcctctgccattcggtggaggcttcaccatggagaccattgatgtctgacaaagagcaaacggcgaatgcccattactgggtgacggtcagcccgacagatctttccagcgcgtcggccgcgcagcgactctgcgaaacgatccatctgaacatgacgcgaggcgtcgcagcctacatcaagttctacggctcgaaaggcgaagcattggtgacgcgagtcattccgcaccagtgcgaactcttcgtgaatgacgagtccggaacgaatcgtcgccgaactgcgatgatgatcgagtacatacgcttcaaagttcctgccggaatgtctctggtcgagcacaccaagcaaccttactgagggcgcaccatgctatacatctgggaagatcaagatatccatcatggcactgaaactgtcgccttcgtcggcgaggccaggtccaactatttgatcatcggattcaaactcggcgatttgttcgccgttgccgaagaggccactggccagatcgtggtaagcccgctgtctcggcaagggatggcggagtggctgaacctcaacggccacaggcctgccgagatcatcagccacggccctggtaatcacaagaacccgtatgtatgggcagattccatcgccctgaaaacgctggcgaaccatcagaacatgcgctgcgtcaccaggccaatcgttggcgtcgatcccgcagaaccgggcaacgacacgacagttcactacgagccgaaagaaccgagccttcccgacctcccagaagggccgatgtctccaccagctccgcccgcgcctccagtgccgaaagcaccaaaagctccgcccgcgcctccggcaccgcaggtaagcaggcggcctgaaccgctggggcttcggtccggggccatcccgtccagtccgtcgcccgcgtcggacaacgataagcccggcgacctgcctgtcgagccgatcccgaccttctgaccgtcgcagcatcgtccagaaaacaccgcagcctatcctgcggtgttttcgcatctgacaaccgttcgtcgggttcgtcatcattatgctgaaataaatgtagacacgcagcatcgacctaggcataatctctttcaacggggcgacaaactgaagcccgaacgaaatcttccaaaacagaggatcgcaaaaatgaccaactccatcaaaaccttcggcgacatccagaacgcagaaatgaaagaactggtcgccttctacaacgctcacaacgccgatgcgactgtcaagcgcttctctgatcgcaagaccgccgagcgtcgctgcctcgccatcctgaatgctctgccggccgaggaagaagccttccaggaagaggaagccccggccaaggtttacaaaacccgcacttccaagaagaaggaagaagagaaggccgaagaagagaatctgaagcctgaagaagaaatcaccgaagaggaagcgctggaagaaatccggaagatgcgcgaagaagcaaaaaacgcaccggagaaggtcaaagaggccaaagacctgtccgcagccatcgccaactcctggaaagacccggaagtctccaaaaagcgcacccagcgtcatggcgtggcggtgaccgtcaaagggaagcgcggtgagttccggtccaccaacgcagcattcatcgagttcggcctgccctcttcgaagcacatccgcttccgcatgcagctgaaggaggccggcaaattgactttcgagcacgaaggcgtcaaatacaacttcgaaatcatcgaagctggagaataagaagcccaaaaagaaagccccggattctgaactagagtccggggctttgtcgtttctgattgttattggtcggcttcctagaacagccctagaatcgtttttcgtcccaacccgctaccgtcgccttagttcggtccgattcgggcctagaacgatgttattttatgtctgaatggggttggcgcggtcttcctcggtcggctccggcgtcggggacgggaaatcgccctcttcgccgtcctgcacatagccattggcttcggccgcggcagcgacggtggcggtctgagcctcggcttctgatgcgtagaagtctgccaatccgcgaccgaccctggttttgccagactcgtcaacgaacgtgatttcggccagaacgttcagctctttgatggccgatagacggctggagtccttgacagtgggatcgcgaaccatctggagaagttcgtgaagcgccgtctttggattccacagatcggacgttctggtcgcattcagtttggctttgaactgcttgcgatagtacgggttggactccatcgcgaagatgcgagcctgggccggcccgtccatgtgctcttcgccccagatcgcccggaagacccgccaggagctgtagccttgaacgcgcaggtcgatgtacagatcgaaacgcttctggttgatcgccgcgaactgcggatcagcgaattcttgtggcgtgactaaatcgtcgggtctgtaggatttggcggtcatttgttgctgcgtccctggagttcgattcttggaccgtcgcggttgcctggctgttgatgggacctagtgctttgccgcgacactgagtatggcgcgattgtactatggggccagggagcacgtctatgggctgcttgtgggtggtcggtaggtatgggtgggttggatggtgaatgagtgttaggtggtgttataggatgttatatgggaggtatgctggtgggtgaggatcggattggctggtggcggatgagcgtttggataaaaatgttaaatcggatgttaggaatgtgtccaggtgagcgattctgccttgtggcttaattcctggttccgctcgtcgagttttggtccctgccgcttagtccgccgtggtgttgccgctgcccatggtttggaaggacggaagtttccggcgaccctgccgcgagttgagcggaatcggaaacttgccgggtaatgtacaagcttagcgccgcgaggctttcaaagactaaactattccaaattcccaaattcccattaatttattaattttaaagataggtaacgtccgtgatagattttttctattaggattgtgcaatcgattttcgctgtagaatagttttaacccatgctcggaaaaccgggaattagggaatttggccgcaaacccacgcggcagtaggcctcccatcttcccagtcagaatagcaatccaggaatttgcggctatttccacacaaaaacccgcctcaaacccacaatttctcaacatttcacgcaaaatccaacaatcatacgcagcagaccgataccgaaaatctatcaattccccacaatacaccgccgccacaacaccctaattcccacatagctttcagacctcacctgttcaccgactaaattaatgttctctgcaccaaagaaaagaccgcccgaaggcggcctaattcactccagctgcatcagtacactagaaatcctcgcccaatatcttggctcgctctgccttgactctgcggatatgcgacattgcatcatcatcagagacagcggcgtcattcttcctgaccatatatatcagcgcatcgttgaatgacggcaaggacccaatcatttcctgaccggcaactttatcggcaggcaggagccatccattcaggccgttcttattcggaatgaacccaagcgctttcaggtgcggagttaaatggcgagaaatcggcttcttcctggcgagaatatcgaaccacttcaagatttccaccgtgttgacgcgccacccaggagtcttggaattcttgccaggcttaacctcttcaaactcgcaactgatcagtacgttgatcagatacatatcaatcgtatcgtcgcgaaccacgccacgcgcattctccatttccgaaatagaaaagttctggacttcgcggtttgcttccgacaccatgttcaggtagccatcgacgccgtgctcttcgatccatgcgcggcattcagccatcgcttgccagaatttgcggccgaagtcggtgaagtccaccttgaacggttcattgccatcgcccggcttaacccagttcggctttccatcctcatcgggcagctgcgcaacgaacatgggatagaaacgtcggttaccagagtcgtcccgttggagtccatcgtagccgttgccgtccatgatggtgatccattgtcgcttgatcgtttcgcccggctcaaacttctggtcaaacgtatcagaagaccgcaccaagaactccttgatgcgctccatgtcgccctttttgaagccggacatttccccgacgttcgcaatgaccgagttgccggtgatattgcgcaggaatggcgtctggtcgtgtcggctcagatcgagctggacgggagccagatcgcgaccgcccgacagttctttgcagatcagcaggccgaaataggattttcccgcatcctgcccaccaatcaacgccagcgagataggcgccgagattccaggatagttgatgcggcagtacaggctcagccagaaatacttgctcaccatccggttcaattcggtgtcgaatggcttaaaaagatcgataagcagcgtgccaattcgctcttcgccgtcccactccggaatcttcttctcaaacgtctcgatcagcgagttgcggcgatatcgacgcgcccaaacgcagcaagtctcaatcgtcttcttgatcgagggatcgtccaaggccgcagccgcgagggcgcccatcaggtcaatcgggtcgagggtcttgttgttgaacgccacgccacgatggtccaccagccggccgcgaaactcatcgaagtgtggatgcgggacggttccatcacccttgcagaacaaagtatcgtataccgcgagataattgctgtcggaagtcgaactgtatttcgtgatgaagtcatcgaacggccctttcaccacccggctgaccggaagatcgaacgcctggtcgagcatcaacaatcgcgctcgctttctcaagtctggttccgcatacgcctcggcgtatcttgccgccttttgcgcgcgatgcgtttcgttcctcgcaatcgcatcatcggccgccttgctcgcggcggtcatcaaagggtccattccagcatcttctatctgcgtgagatcaaactcactggaccctgattcgccatcatcaaaaatattatcttcgtcgataatcatgttaggtttgccgccttctgctttacatgatcggattcaacattgcctctacatattgaggcgaaagggacggctattatctcctacctaaaccggcatagctaataagttccgtccccatccgaaaatttctgtaccgttcgtcgattaaaatacgtcaaacgcaacgacgaaccagaacgtcaaagcggaaagaccgaagaagaagcacagaagcgacgcgaggaagtttgcgacttgtattttccacccctttaggccttcgaagaagatgataaggccgaggaacagcaagccgatggcggtaatcaggactccaggatcgttttgcatattgtctactcctcaccgatatgacggcggttgattctttccaattgttcgactatatatggcagcactacttcatccgtgaaggcagcccacgtccgtcgatgctctttgcggcaagtatcgtggccgcagccgaacacatattcgtgctcagcgccagggatcggcccgcgaaagtaggcgccgaatggatcgccatttgtatgctcgtctccccatggacagcggatgcgatatttgccggacatattctgttggacctggccgcccgctgcctcgcccatcttgtacttcgtacagatatgctcggcatacttcagccacacttggtcataaacccaatcgtcgcgatttatctccaccttcttcatctgtggcataatgatgcggacgccgaaggcctgggcgatttcctctggcgagtagcgcttggaatagtctgcgtgatacagacgcacgagttcgggcttgccgttttcgtcggcatacttgaagctgccgtctttcccgcgcttgttgttgaagccgaatggcatgcgaccataacggctgacatctttgacggtgttgtcaccgcctttctttagcacctggtccacgaacgaatagagcaatgccttaaactgaagcatgtgggacatcggctctttgaagaaataccagaactggtagttgttcggcgaagtctccacaatcgcggtcggctccaggcgttcgcggaactcgtcgcggtcgaagtcgcctttggaacctttgccggagccgatgtcatcgaccattaacgccaggccgtggccgaaagaggcctcgccgcgccagtatcgcatctggccggtcttcgggttgggcgtcttgatggaagacgagatacaggcgtaggcgtttgacctggaattgatgtacttgccttccttccagggcacgggccaccagcctgcgttgagcttgcggccgttttcgtcggtctggactgtggcctcttcagcgtagccgaccatcacccgttcgtcgtccggaatccctctgccgagttctctcaggaattcttcggcctgagccagtcttatttcgtgaggcttcatgcaagtcgctccgggcgccccttgcgtcgaggcacttccacgaattgtcgcgcagcactcgcctttctggcggagtttaggccgtcttcatggattcgactccaggcttccatgatcttgtgctgtcgcgccttttctagagccgggggaatcttcgcgtcatcgatgccgcgcacccacatgaacatcaggaacgtcgccaggtccaggaggttgttctcattgcctttcagcgcatgttcggcgaatccgttgatcagaacatcttcgtcgcagtcgatccagccgcctcggcctttatcgcgggagcgctgcagtttctggcggatcgccgttgcgaacatggacacggcgcactcgtcctgcgcttcgggcttcgccttcctgagaacgtcgaggctggtcatgatgactccatctactggtgaaggtttcttcggttccattacacggactccttgttagtcgcagcgttgatgtacgcatccagcaacttctgcgtatcagtgcgggctacgccattgtacagcagcgccattacagcatcatgcatcgcttccgtctcgcgaaccgggatcagggcataatcctctggcatgctgcgttgggcttgagcgaccggggcgccgtagagggcgcctttcctgagcgtcaatgagtcgctgcttcggtgtatgtcgaggatatacgcctctatctgcgcctcagtttcgcattgtgcatacagcttgccgtcaagcttcccgccgaaatggaatgctccccatgccaccggctcttgcttctccaactcggccagcttcgtcttcagctcatgaatctccatttccatgccaccagcagcgtggcgggcggcatcacccttggacgcggcgtcgcgtgccatcgccagcgcttcgttgagccggaatccttcgtgtacccaatcagtcaactttccttccagctcagcgaccctggccaaggcggcgtcgcgctccgcccgcagttccccgacgatgctgtcacactcggcgaccgttgttagagcttcggggtctttcaagccatagtcttgttcgtagaccatgcccgactcaacgctgcgatacccgaccactgccggccgctccgcctctacctgctcggcctgggaaggtgaggtttgcgaagtcacctcgacgacgcgcgtatccatttcgggactcttcgagcagtacagataccggctgaaatcgcatggagtccaatcggattcaccaatctcccgagactggaattgataggttggagctgtagcgatagccgtggatggtcgcgccaggacggcgtcacgctccaccctgtagcggcagtaagtgtgtccgtattcatcgccgaccacgccgtcgcaatagctcgcggccagttcgctcccgcgcttttccgattcttcaagttccttttccagacgagcgatggtttctagttgctcggcgagccgattcgcatcagtcttttcgaacttgggagcgcattgagggcaatcctcaaagtgtcgctgaggctcgtcgctgatccacacctggccgctaccattacaaatggtgcattttccacgaagcaaagtttgaccgatgccagtgcaggcggcgcacttccgaagaatctcattttccacgaaatcgattcccgccttggtgagcatccattcagccctgatacggccggttcctgcccagttttcgaactcttgcgcctttacataccccatctgtcgaagttcatttagcgccttattattgggaccggtgaatggcggttggttgggattgttgtacagatacaacaatgcagtttgatggtggtgattcagcgtcggtttattgttcatgccaatcacctcaattacaaatggcgatgttgagaactttgtcgcgaccggccgcgaacctctccaggaagtccacaaggtcattcaaaatggtccccgctcgacctaatttataattgatcagaagttgagcaacccggtggccgacgaacgttccctcaggaatctgcggccatgcttcgccgatacttttgagcaccgcgtcggtgtagatgttgtctgcgccgaccttgtggtggtcgaggatcgtgcgatcccgaacatatcgattgattatccgccgcaggaattcgtcttcagtcccggccagggcgccgcattcacgaagttgacgcaggaggcgccaccccaggttacgctgccatttctcggcgaattcttcggcctctgcgaacgacgcacgcatgatgctctcgactgggatggtgatcgcgccgccttctttcgtcccagtttccagaactgcccattcgccgtgcttgcggtgctcgatgaagccgatgagcattccgacgttagtttcagattctgccatcccagtcacgcgaacgacggaatggcgcgggaacgctttcgatccatagaggctggactgggagttgacccacccggccatggccaagtcggaggcttcagcatggatcagctcgcgacgaatgcgaacggcaagagcctggtccagctcgcgactgcgacgcaggtagccgggctttaggttcgggtcgcgggtcttatcgacattgggattcggattgccgaccgggagttggtcgcgggaaatcttgcactcttgcatttaatgtatcctctgttttggagggcagtacaggcggcggcgctagtatcggccactttcctgccgaagtaaagtcggattaaattaactcgctttgacgagtcagctgatagtatactcttcttgcgcagaggtaaagcagaactgtacgttataaggaacattccatggcggaacatatttttactcacgaaggtactgtggtgtttgagggccggtctcggacggtgaagctccggcgcggcaaccaccactgggtagaccccgatagacatcgctatagcccacaggacggccgcgccgcttcccaggctgtcaagggtgcggtcttggtcctctcgaccgtccgctggctccctggggcgaagaaggccgcagagcagctgaaggccttcccttataaaggaagagcccatgcgctcggtgctgcttggcactatgttctgttgcgacgcacgaaaaacttctatgtcgatccgcacggccgcaaatatcgtcgtgatactgggtggtctgtggacggtctgcttaaactgagtctcaattcaattaaacctagcgttggagaacgcaaatatgtcagcatctaacttcaccgtcgatcagatcgaagagcgattcggtttccgacccaatagccagcagatcgacgcgataaattccgtcgttaactggtatcgcggttggtgtgatcgagcgcaccgccgtcaggtctatcgactcgccggttttgcaggaactggtaagacttctattgcgaagatcatcgccgaactttgctgctcgatggactggactgtcttcatcgcgccgaccggaaaggccgccgcgcgtcttcgtgagaaaggctgcgtcaatgccaggactcttcacagctttatctatcgaccgattggtgaagatgaagacggcgaaatcatgttcgccaacaaagactcgctcgacgagaagccgaagttggtagtgctcgacgagtcgtccatgatcggcgagtgggatgaagagcgccttctgtcgcatcgaattccggtcctggagattggcgactttggccaagttcctcctgtgcgcggcgtccagatcttccacgagaacagttgtgataccatcatgaccgaaatcgagcgcaacgccggcaatatcgttcgggcgtcgatgttcgtccgccagggcaagcgcttgccatgccgcgagtatgatgacatagtggtccgggccggcttcgatatgtcggatgatgaaatgcggacgttcctggacaacgatggtgtgattctttgcgcttacaacaatactcgccgtcgcttgaacgcacgcgctcgccgaatcctcggctacaaaggtgcgcagccgggaatcggcgagaagctggtgtgcactgggaaccagcacgaatatggaatcatgaacggcgaacaagccattctgctggacttcaagccagttcctgaagggcaagaagatgatgatgagcctgatgaaatgttgttcgccaaagttcgcattatcggcacgaactatgagcgctgggtgaagttcaaccctctgagtttttcggtcgaagaagacgtgcggctggaggcgcagaaggctattggcggattcgacttcggctgggcgatgacgttccacaagtcgcagggttcagaatggaaacgggtcgccatgttagaagaaaacttgccgtccatcccttatagtcagttgatgtatactgggataactcgcgcaatcgaatacttactgttcttgcgtaaaagctaggaacttctcgaacataaataagttccctagagtttggattttcccgaaagaaaatatttaggaaagttcaggctaaggtattcccttcttcaattagtttagagataatcccctcacaggccaataagccatccctttaaacattcccggagtaagaacatggaacagaaggaccagaacgaacagacccaaggcgaagagctgaccaaggaacaagccgctgccctgcgcaaggccgagaaggccgctgagcgccaacgtaaagagcgcgagcgcgccgagaaggccgaagccaaggccaaggaagccgagcagaagaaagccgagcgcgaagagaagcgcaaggccgagcgcgagaagaaggaagccgagcgcgccgagaaggcgaaggaaaaggccgccgccaaggaagccgagcgtgctgaaaaggccaaggcgaaggaagccgagcaggccgagaaggcgaaggcgaaggaagccgagcgcgagcagaagaaggccgagaaggaagccgagcgcgccaagaaggccgaagagaagaaggccgcgcaggaagcccagaaggccgcccgcgaagaagagcgcaagcgcctggccgaagagaagaaggcagagcgcgaggccgagaagaagcgtcgcaaggaagagcaggaagagcgccgcgcgaaggccgaagcccgccgcgaagacctgaagtccaatggttcgcgccgtccgcgtgccacccacttcatcccgaccggcgacggccatggaaccccgcaggccttctcgactcgcggcaaggtgtttgcttacatcaacgagcactgcaccgttggtgagccggtcgaaatcgaatccttcggcgagaaggtggcccacctgctgtacggcacctcggttcgcagctatctgagcaagctggaaatcatgggctgggtcgatctggttgccatcgcttcgaaggaagacgaagctggccagggcgatgacgagaaggccgatgaaggccaggagcacgacggtgaaggtcagggtgccgacggttccgatggtgaagaagagtaagccgccgctcttctgagaccgaatcgtctagctcttcaagggactcatgaaaatgggtcccttttttatcctcccaagttctgtacactcataaggaacatctcatgattcctgatcacaaagttatcatcgtgggagccggactcgccggcctgatcgccgcgcatcgtttccctcaagcccaaatcatcgacgcggcgacgccgacgagcaaggaacgccacaacgcgctcttgcggttccgctcaccagtcatcggccaactcaccggtatcccattccgcgaagtcaccgtacacaaggccatctacattgacggcgagttcgtttctcagccgcgcatcgactactgcaacatgtactccaggaaagtaacgggcggcctgtcggatcggtccatctggaacatggcgaccgaaaagcgctggatcgcgccggccgactactatgagcagctggtcgctaagctggcgaatcgcatcagctggggcaggcctttcgacgcctctttcttccagttccttcgccggcaagacgatcacgttaatatcatcagcacggcgccattccgcgccaatctggctgcggcagggctggacctggggatcgacccgtcattcggcgaaggaacctccatcgtcgtgagtcgatacaagctttccattccttgcgatgtcttccagacggtgtatttccctggtcccgaagtgggaacgtttcgagcgtccatcaccggcgacacccttatcgtcgaatccgttactaagggcgtcgtggagactgtagatggtgaaatcgaaaccatcgaatgggacagcaactgggacctggatgaagtttgctcggccttcggcatcaggaagaagaatctcattccggacggcgagccgaccgtccagaccaagggtaaaatcattccgctcggtcgcgacgagcgcgaatccatgatctggaatctcacccatgaagccggcatcttctcgctcggtcggttcgcgacctggcgaaacgtccttctggacgatctggtttcggacatggacgtcatcgagcgcctgatgacttcttcgtcttatcagaaggccaagaagatgttcgtgaaataatttacacaaagtgctttacttctgagccaggtgagagtagtattccctcatcgaaacgcgaaacccttcaaccaaaaggaatcgacaaaatggcccgcgaagtaaccttctccaccgacaaaaacaccaccaagacctacgccaccaagatcaacctcgaacgcgccatcgccaaggccgaatggctcggtgaaagtgcacgctacttcatccacatgaccgaggatggccgcctgacccctgtattccttcttaacagtcttcctgcgggaactggcgcggtatggtgcgcccagcacggctggaatgtggtaggttaatggcagtcgatcctcgcgaggcagcgctcaagcgggcgctgctggctttcttcagggacacggatgcccttggcggcgggagtctcacaataacagcccgaatcgtcgggccagaaggcgacaggaagtttcgcgccagttattttctgaacggcgagaagctgagcctgtccgatatcatcgctaaagtggaggccgaagatgggccggattgttaatatcaaagtagtcatttctcgcacgaccgagcgcgacttcatgggttcgccgtacatccatgagtcttatcgaactttcaccttcggcgccgacaccacgatggtggcggcaatcgactgggtgaaaagccagtgcccggaaatcgtggacatgctcatctacgaacctgaaacagtggccgctcagcaggagcgctattaatgtactcaccagaccatcctgaagaggttcccatgtctttcctcgaaatgcaaatcgacccgccgcaaacgcgacagacagcgccgtctttcgtgctggtaggcatcctgtacctgatcggcgatgggcgcctggacgataagcctttcacttcgttcaacctgtcgttcggcagtcgcgaagaggccgagcgcgcccgcgacaagattattgagcattacctggaccgtcgcgatattcgcgccgaaatcatccgctgctactgaggatcgcagtaatgtccattgaactggtgtaccggacctctgacggcactatcttttcgtccatgtgccacgccgaagagtatgaagaccgtctggaggcttgcagattgctggccgaagaaatcgacagatacggtcttcataaggaagacgcacaagcgctggctatggctctggtggagaaattcactttcacgccaattccggaagattcctgatgaaaatttctctgataagttacacccagaacgcctgggaacttctcctggggacgaaatccactcgcatgcgcggccaagacccggcgaccatgaccgaagccgaaaagctcgaccactggaagtacatgctggacaccattcgctcgccgttcgaattcgtggacttcattttccagatcgagggtgtgagcaagaatttcacccatcaactcgttcggacgcggaccggggcttaccagcaggaaaccagtcgcgccctggaggttagcgccgttgttcagccggaagcattccgctgggatttcgatgagcaggctacggccaatggcgagccggacccgacctatcacgcccgcgaagagctgaaccgcctgtggcacgatgccatcgccgacgcgcagaccagttaccagaagctcttggatgccggcgcatcgctccaggatgcccgcgcgatcatcccttccaacatggaaacgaagatcgcggccaagttcaatctgcggactctcagcgacatggcgaaagttcgcctgtgtgttcgtacgcaaggggagtatcaggaagccttccgcgaaatgcgccgactggttctggaagtctatcctatgttcgatagtctgctccagccgcactgcgtcgccactggctcctgtgccttcccgcgctatggatcgaaggttctgaatgaagatgagatccatgagcaatcctatgaccgcttcatgtccgctctggagacgaagcccggccagattcctgtggttgagttgccggtgaaaccgatctatcagtgcaagttctatcgtccatggatggatcgctcggccgagcaggaagagctgcgccgcgagttctggggatcggagaaacaagaggccaatcctgtagcgatcaatgggaagtcaatgtagcatgaagatcatcatcgagaaggttggtgatgtcgcacaagtcgaagtgaccaacggcagcgaatcaattcgcgtcaccatgaacgtgaaatcgttcgatttggttcagaacggtgaactgttccgtctaacttccgatggcactttcatcgagaaaaccatcacccagaaagcagaaagcgagggaatctgaatatggcacgaaaacccaagaatggcatcatgatcttcgatctggacggatgcgtcttcgacgatagccaccgtaaaagcttcgccctggaaaagcaatgggacgagtaccattcccgtctcgacaaggacaagctcaatccgcatgcagtcgcacgaatccgtaacgccatcgactccgacctgatgattttcttcatcaccggccgaaccgacaacaactattttcagaccagggcgaaaatccatcgcgacctgggtatcgccgaacatcgcgaatatgagctcatcatgcgggagtatggaaacacccagccggcgccggagttcaagcgctcagtcgcgctagatattctgaagaagatcgacggcctgaccaggatcgtcgcggcattcgatgaccgccaggacatcatcgacgcctacaagggcctgggcatcgacgcctacatcctggacctggaaggttgcgacgcgccgttcttcgccgtcgcaaccgatagcgaccccggtagcgctcccaacgacatggcaggcgagacgatcgccgcagcctcctactccgcccctaccctcgacgaggcgtttgcgcagtccccgtctccgctctacgaagcaccggccgaagagccgaccgaagaggcggccgaagactcagcagcgccgttcgccatggaatccgcctggcctggtgacggtgatgccgatcccgatgatttcgtggaggatgttctcaacaacctgtcctcagccgcagaaattttccgcgaccgccagagcgcttatggtcgaaatgatctgatgtatggcaagatcatggaaatcctcttcccgaatggcatggtggcgaagaccgcagatgaccatcggctcgccctgttcgtgatgcatacagtgggcaaactcactcgcctggcgaatagtgggtttgaggatgacgattcggtatttgacttgatcaactattcagcgtttgtccacgccaccatgcactccggccgcatcacgccgaaagacggacagaaggcataaccctgcgccgttgcggtatactcttcaggccggtcgcgaaagcagccggcctttcgacataagagggaacagacatgagattcgccgtatgggatactgagaccacaggactcccgttccaccaaagggtaagtctgagaaagcaaccgaggatcattgaattcgccggagtgatcaccgatggcgagacgattttggatgaagtagagttcatctgcaaccctgggattgtgatcgaagaaatcattacaaagatcacaggcctgaagaatgaagacttaatcaaacacccatcgttcctcgatcaacgccagaaagttcgcgatttcttttcgaaggccgacgcaaatattgcccacaaccttccattcgataaattcatgcttacctgcgatttggctcgcggaaagctcggactggaagaagtcaacttcccatcgctcgatatctgtactgtagaagagtcggcgccattgttcggccaccgcatgcggctgcagcatctgtatgagcactactgcggcccttatgttcagaagcaccgggcattggacgacgtgcggctgctccacgaagtatgcaagcgcatgggagtatatcgggcgtatcaagcaatggaggccgcataatgtctttccctcaactccgcgttcgctccggctactcatacggcgccgcatatggcaggtttccggaaatcatcgagcgcgccaaagaaatcgaatcaccttttgttgccatcgtcgatgatgggacctggggtcacgtccgctgggagcaggcagctaccaaagcagaattgcctcgcggattcggcatggaaatcccgatcaaatgcgccgatgatggcgaaaaagagctgaagctgaaggcctgggcgctagccaaagataccagaaaattctatcgccttacttcgaagactgtccagaatcaaggcttgtcgcccaaagaattccaggatgctgacggcatcatcaagtttgccggcgaggcctatgcccacttggacttggccggaatcgactacattgacatcaatcctgcgtcgatggtcgccgcgcacggcgccatggagacggccagggcgttcggcaagcctgtggtgattacctcctacaacgacatgccgtccatcggccatgtagattttgcttcggcctggaaggttcgggaatcggtcggacttcgccacatcgcgactgaggaagagttgtggacccgtcttcgccatatcatgacccgcgaagagttcgacgaggccgtggccaatacgcatgcggtggtcgagcagctggtcgatgtaaaactggcaaaagcgccaatgatccacctagatggtgatatcgtcgccctggctcgcgagggccaagcctaccgtctcagtcgcggccacatcaaggaatggacccaagcttacgaagatcggttccaggaagaaatcaagcaaattcagctgaaagacttcgacagctacttcctggtggtagccgatctggttgcgttcgccaagaagcacatgctggtcggcccggctcgcggctcttcggccggctctttggtctgctacctgctgggtattaccgaggttgatccgctcccgcatcgccttctcttccagcgctttatcgacatttcccgttccgatcttcccgatatagatatcgacttcgccgatacccatcgctatctagtgttcgaatatctccagcagaaatacggcacttggaacgtggtgaagctcggtaacatcaatacgctgaaggccgcgtcggttatcgctcacgtcgggaagcgcttcggcattccattccatgataccgacaacatcaaaaactcgatcatcgaatatacttcggcggacgaacgatatggaaaaggattggaggacacgttcgaaaaaactcaacccggccgcgacttccgcgaaaagtatgagattgcgtccgcctgcatgggcgacctcgaaattcacccatcccactctggcgtccacgcggcaggcatcctggtctgcaacgatgaagtaatcgatttctgtacggttacctctgaaggcgtcgcgcagctcgacaagcctgattcggaatatttgaatcttctcaagattgacgcgctaggccttcgaacgctgggcgtgatccaagatgcgaattgtgtgacggcgcaagagttgtacgacttgccgctgaacgacaaggcggttttggatgttctgaacgaagacaagatgtcaggcatcttccagttcgaaggccaggccgtccgctcagttgccaatgctatcaacatcaccgcgttcgaaaacatcgaccacattacggcgctcgctcgtccgggtccgttgtcttcgggaatggccactaaatacatcgagcgcgtggccggtcgcgagcctgtgacctataccatcccgcaggtcgagcagtatctgtctggtacgtatggcgtgttcctgtaccaagaacagatcatgtcaattgtgaaggatattggccagttcgactgggaacaaacgtcggcaatccggaaggcgatgtcggcgcgaaagggtgaagagttcttcaacaagcgccgagaactgttcatcgaaggcgccaagaccataggcgtcgccccggaagacgctcaccgagtttggcaggaaatggtgacgttcggagcctggggattcaaccgctcccactcggtaagctatgccgtggtgacgtactggacctgctacatgaagcggtatcaccgcctggaatacgcggccgcgtgcctccgggcggcgaaggacgaccagcaaactgtgtctatccttcgcgaattggccaaagaaggcgtagaatatacggccctggacccggagcattcagaactcaactgggtggtagcggacggacgcctgatcggcggcatcatgaacgccaaaggcttcggcccggctaaggccgagcggtttttgcgtcttcgcgaggaagtcaaggccgcgaggatcgccctggccaattgcccgatttcggcgcaggatgtagaggataaggctgatgacgttgccgcgctggaatcccagattctttcggcgaaagtcagcagagacaaagaactggagaagctgctcaaagctgatctcaaggagttgaaagctgaactgaaggagttgaaggcgcaatataaagagctggccggctcccatcttaaaacgcttcaggattgggagaaagttgccgcgagtttgtccaattctgaggttcaattcgcggatttgaacgagtctcacacactctggggtcatgcctatgacaatcctgagttggttggggtgacttccggaaatcccattcagaacattcgggatatccgcgatggcgacgatggcctagttatcgtcaagctggtgaagaaagttctgtcggatgagaatgaaccgatccgccagaagaagagggctgaccaaggaaagaatccggtgtacaaaggccagtcgcagttcctcgatttgatgtgcgtggatgactcggttgaccaaccgattcgtttcaggattcgccctgaaaaatatattcagtacgggaagaatattgccgaaggaacgccgaccggctcttggttcctcatcaaaggatggaagctcagcggaatcgatatgttcatcgtgaaggccgtcaagcggatattgaccgagcgcgagaaagcaaagttggcagcgcaagccgagaaagattccgaagaggggaatggcgatgaatgatcgcgaaacgaaagccgcgaatgtgtttaagcaacgctcgctaggcagaatcctggtcgatttcctggagacgcgccggtctggcatgtccgattcgatctgtctgaatcgtcacggtgtccagttttgggtcgagttcaaggctctggaagcttggccaaagcgcacctcgacctgcccaatggcgcgctgtttcgagcctgggcaaatccctttccttcgggagcggatcggctggggcggtcgcggcttcgttctggtgaaaataggaaccgattggctgcttctgaatcccatgctcgatctgttcgatcttaacagccgcgacctggtggaagtcgcgagtcatgcagaaggactggacaacatcattcaatttctcgccgatctggagaacaaatgaaagccaaaacctttccagtcaagggtatgaagaccgaggcgatgcaacaccagttcaatgccctggaagcttcccttaacaaaaggaatttcgcatacctgatggagcagggcaccgggaagacctggactactttggcagactcagttaggctcttcctgcaaggaagggttgacgcgctgcttatcgtcgcccccaaaggcgtacataccaactggattctgcgcgaaattcctactcacgtcgcagtcaagaccctgtgcgtggattggcgcggcagaccgacttccaaaaaggctagggcgcgtttggatcgcctgtatgccgagacgttctccgacgaaaaagtgcttcgggtatttgccatcaacgtcgatgccatcaaccatcaggctggctatgacgaagtcaagcggttcctcaagacgttcagagtatgcgcgattgtggacgaatcaacgaggatcaaaaacccacaggcgaaacgcgcaaagaaaattgtagaactgggcgagaaggccgtggcgcgtcgcatactttctggcacgcctctgacgcgagcgcctacggatttgttcatgcagtttcaatttttgcgcgatggcattcttgggacgaaatcctatcgggcgttcgtggccgaattttctgttcttgttcccagtgacgatccacgaatgatagccatcatgcgcaaattggatggaaagaggaccgttccccctcagctcgtcgagaaagacgatctggggcggccagtattccgaaatctcgacaaactgcggtccctgatcgagccgcacagcttccgggtcacgaagaaagaggcattaccattcctgccagaaaaggtttacaagcgcatatatttcgaaatgtcgcctgagcaaaggaaggtttatcagcgagtggaagaagactaccacttcgtgctcaagaacgaagatttcatgttggatgtatcgttcgacgccgctgcggctcgttcgaaactcaagcaagtggcatctggctatatcaacgtttatggggaaccggtgatcctgccgcccgaagataacccgcgattcgcagtgttcaccgaccttctggagggcctgttggaggaagacccggaacggtctatcatcatctgggcgatgcggattcatgaaatcggtcagatcgctgcgtatcttgagacccaaggaatttcgtttggaacctattatggcgagaccaaagaggacgaacgagaaaagctgatcgatgattttcaggccaagcgcgtccaagtcttcctgggcaacccggccgcagctgggatcggaatcacgctcaccgccgcagacgtggcaatttactacacgaccgacgaagacaacgagttgcggatgcagtccgaagacaggaaccatcgcatcgggaccgtcaactctgttctgtacttcgacctcatctgcctggactccatcgacgagaaaatccagactagtttggagtggaagcgcaatctcgcgagttatgtcgttgatggagtgttcgaggctgacgttagcactcgcgacgaaatttaatatgtaaatcagtagccgtatcaaggaagatgcggcataatatctactcaatacttagttcaagtaagggaacatcactaagttggaggctgacatgagcgagcaagaattggaagttccggagtatctgaaggacaatgcgccgggcgaaattgactatttcggcgtcatggatgaaatggcagtcgaagccaccgacattggccatcgactgctgaacttggtggacaaggcgtctcagctggacggcgaaatcctcgatttacaaaaggcgctggccgaaaaagaggaagagctgaagaccctcaagcgcaacaccattcctgagcttctggaggaactcggccagaagaccacgactttggctgatggccgcacggtaaaagtcgagccgaaagccatcatttccgtcaaggaagagaacaagtcgaagttctggaagtggctggaagacacagacaacgacggcatcatcaagaccaaagttctggcagaattcggtcgcggagaaatggaagatgcgaagaaggcggccgaagcgatcatcgaagccggctatgacgccaccatcaaccgcgatgttcactaccagaccctccaggcgttcggtcgcgagtacctggagaagggcgaagagttgccagatttcatcggcgtccacgaatataaagaggccaagatcacgaagccgaaggtgaaaaagagcaaagcttaatatgtaatttgctttacttagttgcaacttacgttattataaacccacagttagaaataactgaaattcgacaaacaaggagcctaacatggctggcaagaaaaccgagacttccgaagcaactgaagaaaccaaggccgttgcagtggccaacggcggcgccgtcgcgactactgacgttcccgacttcatggacctgggcgcgtatgacggcgccggtttcgaaggggctgacgcagattcctatgccattcccttcatccaagtgctgcaaaagatgtcgccgcaggtcgatgaagacgatccgaagtacatcgagggcgcgaaggccggcatgttcctgaataccgtcaccggcaagatttacgacggcaagaccggtctgctgatcatcccggccgcgtatcgccgcgagttcatccgctgggctggtcgcgaggccgagggcggtttcaaagggtccatcagcgtcgaagacttcaaggaaatgatgaaagaccctaccaaggtcaaggaagtcgaaggacgcctgtacgcgccgaacgaagacggctcggtcagcgacaagaaatcggattacttcgccgacacccgtggtcattacgtcatcgtcatcgatccggaaaccggcgacttcggccaggccctgatctccctgtcgtcttcgcagatcaaggcctcgaagaagctcatgaccgctctgtcccagaagaaagttcagactccgcagggcctgcgcacgccgccgactttcgccaacctggtccgtatgaccactgtcggcatgtcgaacgacaagggcagctggtccggcgtccagttcgaactggaaggcctggtgaaaaacccggatcacttcaaggcggccgccgatctgtacaagtcgttcgtcggcggtgaggtgaaggtggactacagcaagcaggaacaaccgcgcggcgacgccggtggcgtgggcgatgccactgaagccgaagagttctaacgtcaacggccagagaaaggcgctgtaatggcgcctttcttttgaggaatcgaaatatggactggaatgacataggtagtaagatcggcgcggccgctccggccctggggtcgctcctgggtggtcctgcaggcgccgccgttggcgctatcgtcgcgacggcgctagggtcgaaggccgacccagcctcggtcgcgagcgctctagacgcgaatccggaggctctagcgcgcctcgcagaactccagagcaccgagcgcgttcgcctccaggagctggccatccaggccgaacaaaaccgtcttcagtctgagcaaaaccagctccaagccgaactcagccagttcgccgccgaggcggcagacagggattcggcgagaaggcttgctgcgcaacaaaatgacttcgttcgcccggcgataacttttgctcttctgaccggttccattctcatcatcatcgcaattttcacattcggccgcgaggcgctgatggacccgacttcttccgtcgccatcggcaccatcatcggctattggtttgccgaactgaagtctgttatggccttttacttcggcaccactaaggacggatcgcgccagagcacggcgtccatcatcaacgcagtcaaatcccaaatacagaaggaatcgaaagaatgatcatcgaacgaatcatgaatagcgaactccatgacctggtggtaaaatggggttcagaccgtaacctgatcaaaggctcttcggccaaagatcagttcctcaagctggtagaagaattcgcagaagtttgcgaagcctacatccagaataacaccgccgaagtgaaagacggcatcggcgatgtcatggtcgtggccaccatcatggccgcgcagctcggcgaaaatctgttcgaccatatgtcggccttcgtcttggcggtcgagcgccgcccgtcctacggcgaagatctgaaattactcggcgacctggccggctcgctggctcgcggaaatcgttggcttgccatcaagagtttggtcatggcagtcgcatccctgttcgacgcggcagaagagcatgacaccagcatgctcgaatgctaccaggcggcctacgacaccatcaaggatcgcaaaggcgtgatgtacaacggcgtgttcatcaaggagtcggatgagcgctatgcgtcgatcatggccgagctgaatcacgccaacgaaaccatctgatccggcttaccgccattcagcccggttcgccgggcttctttctggagaattctatgaaaccgatgttcgcatcgatggccgatcccggtctgctggaaggccaactgccaatcttcatgtcgccgaagatcgatggctttcgcgccttcatccacgatggccacgctctgacccgatcattcaagccgcaggcgaacgcggcgatcaataaatacctcagcaacccgattttcaacggcctggacggcgagttggtctgcggcgacatcaccgacccgaaagtctttcagaaatcgtccggcgatcttcgccgccgcgatggcgaaccggactggtcgttccacgtgttcgacgatttcaccgatcccagaatgccgactgacgaacgcctcgacgcggccgagcaccgggtcaaggaactccgggaacgcttcgaaatgacccgcatccacctggtcgagcaggagctggttacgtccgttgaacagatgaccgagacggagctgcggcacgtcggcctgggcttcgaaggttccattggcaagaagaagaatggaatttacaagttcggtcgctcgaccgcgaaagaaggccattgtgtgaagttcaagcggtacgattccgaagaggccgaaattatcggcgtcgaagagttgatgatcaacgaaaacgaagccttcatcgatgagcttggctacactgcccgttccagccacgcagaaaaccttgttccgtccggaatggtcggttcgttcgtctgccgcaacgaaaaagtttggcctgggcagacattcagggtttcggcatccagcatcactcacgatgaaaagcagcgtctctggaaggacagagaatccctcaatggtcaggtcatccgattcacgcatttcccgcatggtgcgaaggataagccgcgccatgccgtcttcgactgctggttggacggatggggcgcgagccactgattctagcggacactagatcgaaataaacccggacgccttatcctaaaggctatccgggttttctcgttttaatgtcgacaaattaagccttagaccggactcgggcgccagagttccttggccagaaagaaggcgatttaatatcgcggtgcgtatcgttaaacagttaagcgcgagcattttcgtcgagttataataacgcccgacccttccgattaacacagcgcatccccaagctattatcggggtgaggagaagaccgcaaacagaggactaaacatgaaacgcaaagagcatcgcaagcgttttcggccaagaataagcccaagactccgggaagagttgatatccgttctgacaaagatcataggcgagacagtcaaggataaggtggtaagagcgctgttaatcggcgttctgagttcgctagggaactatgtggactcggtcacccaggaagagtctgtcgcgcctattgaagtcaggaagattgaagaggcaaagccggaaagcaaaaaggccgctgaataagcggccttttctttcggagcagatcaggagccttgattgatcgcggcgacggtcttcacatagcggtttatccggagctgaccgtggttcgcatcgttcggcgcggcgccgttgatggtcttcacgaccatggagaagttgttggattccgccatggggatgcagcgattgcgccagaagaaccatgccgaagacatcgacgcgccggcaggagtttccagcagttccggcttctccagaacgtccataccggagtcttcggcgaacagggcatagttcgatttcccggtcagctggatcaggccgcgaccgcgatacttccagccgtccccatcctgctcgcagccattacccatgcgatccgcgtacacgttgttggcgatggcgaccggattgcgggctaggcggttcgccagagcgttcggcacatacggacggacgcgcgggtccactgcgtaccggcgcggccaagtgttggccagtccttgggcgctgtagttgagattctccaccagactcaccaatccaccggactcgacgccgatgttggcgaggtaggccgcaatggctcgcggcgactcgatgtggaacttatccatggccgcctggatgtcatccagccacttgatcgcccgatccatggtacacccggttccggtgatcaaaatatccttcgttattttcatcagtactcctgatttttgaacattgttttcagagccatgggaagtcgcggccgatccccgctgttccagtcgcgaatctgctgcctccagtgaacaagggctgcgatcagcccagggccgtccgtggtttcgatacccagccgtctctgctcgtcgtggcgatctatgggccagcgggtatcccgaaggatagcccgcttttccctggctcgtatagcgtcctgcaaggccttctcccgcttcgaatcgaccggggcgataggcccgtgctccccagatagaatcgcagcgtagatggcccttccgtgggcctcaacgtcttgcggattggcggtgaacggcacttcaccgattccctcgaaagtcaccatggcgtggatgtttactgcgtccagccaacgtgggtttctgatccgcgtccatttcattttacgtcactcgctggaaaagggtcgcggagtcaggggtgttggcgtcccggttgactacatagcccatgcagcgccaagttccggcaggtctttgaccgctattgtagtttgcggagcaagacgagtagatgagaatggagccgtccacaaccactcctggttgaacggtcgcggttggagcggcattgtccagaaccgcgaaaatgccataggaaccgactccgccaagacctacctgaaccagcgcctggttgatgtagttattgtagttcccggcgtggatgaccggataggcgtttgcccccaggtttccgccacctactttgagaacgttgtcggtgtccaagccgaagttgacgaagaaaccaccgccccgctcgaatgttactgctgcggccgcgcctgccgttgcgccgttctggaggctgattgcgccgacgcggccggaagaggcgatcccgctgccagttccggcgatgcggttgaagatcatgtttccgttggtggcgttcgcggcgttcaaatccaccttcgttgccggatcaaagttcccggatcgccaaatggtttggccattccaggtcggcgcggtcgggttggccgcccaaagattcatgatgttgctggaatcggcgatttccctggagctgttgccgagcgatccgccgccccatttcagcttgttgtcggtatcgatgccgaagaacgcgccccagttgccagggcgaatgaacgcgataacggcaggcttagcagatggaccagtcggcgagttgtaaaccgtcaatggcgcctgggaatagtcggacagagacgcgattggggcgaacggcatggttccgctgaatatcgcagtgctgctagtttcctgcgtgccggctttgatggtcaacttggtgttcggattgaagttccacggcccccagaattcgtttccgccccatactggagtgccagccatagaattcacgtggaaacgaatattcgactcgtcagtgaccacataggagttattgccgagcgaccagcctgctcgcttcagctggccgtccttgtccatgcccaaataccagccggtttgggagttgtcgaagtagatggccgcaggctcgccgccccctctaccgaagatttgaagggttgcgtttccatacgatgcagttgtggagctggagccccaggtgttcatatttccggtattgctggtggtattgcgaattccggtcggtcccgaaatgttgttggtagtcccgacagtgagcttggtggccggatcaaagtttccggagtcccaagggacatattgtccagcaaacagagggcgattgttgaatatgacgttcgtggacgcccagtcccatcgcatgatttgcgagcgataagagccgtcaggattggtggtattgactgcgatcaccgcgttgttgttggcgtccacgccttgtgcgaaggtgaatttccaaccaggctgatcggcagtggtgttctgccaaagggggccagagttcgcgatgtacgcgaggtttttcgcaacatccagtcgcggctggaggaatgtaacattcgacctgctgaacaggatatcctgggtaggaccagcggacccctggcgagaatagaacgccatcgacccatcagcttcagagataaagcgatagtcgaagtctttggcgcggttgttgttgaagtggaaatcgatgaaaggccgagcgtcagacaactccagattggcgaaccacggcgtagtgtcttggatagcgacgttcggcttgttgacgacgtcagcccagtccacttcagtcagcttttgggacgcgacgtaatccttcacctgtttccagcttggggcctgataatcttgatcggcgttgcctacttggatgcgtggcgcgcctgcgagaatcctccagcggtcgccggtggcgtcgaatacaagctcagcgatgaggccttgaccgagttctccgccggtcaacgggaagttcgctgcgccgacgatggccttggcgccaaatccggagacgttgatggtggaggcgccggtgttcatggtgttgaacttgacacgaagaatcatgccgtccaccaggccgccttggagctgcggaactagcgtcaacgtgtaagcgttcgccgatccggccgcgactccataggtgacccgaccttgttgaagggccatgacgtttaccgcatacatccagttggtccacgctccggcattaagcccgcgcacagcgacgttcccgacgcgatcagtgtagcgttggacgcagaacgtattggctccggacacccaagatttcgcctccaacatgccagcagcggcaccagcggaagccggatatacgggggcattctgagaagcgataaccactgaatcagagaagaactcccacgtcccatttaacaggtcgttgaagttgcggccggtcgtgatgacttctccgccagaagataggcctgggcctccggccggcatcgggatgttggagcgcatcaccgaccatgcgggttgttcttcccaagtcgtgctgctgagagggtcgctcgcattggcattcaccatggagcgataacgccgcattatgccgtcatttccgacgcgcacgacttctgcattctgttcgtagccgccaggcatgccctgaaaccacggcggcgccatttgtcgctgccacgcctgtgcgttctgggtcgcgatgaagaagagttggttttgaattttccgctcgaccgctttggcctgcgggttgttcgacgccagactgatttcgtagtccggcgtgtagccatcgcgaaggttggcaaaaccagtggaagaggtctgcgggatcgggtctttgtcgccctgcgcagcaaacggactgggtatcagttcgggtgtgatcacgtcattactcctgaatgacttttacatcgcaaccggcgcaagtcggcatgataccgaccgcccggtcattcatgaggttgatcaattgcggcgacaaattaagcgccggaccaactctgtattctagcttgaacgccccactagtgggtaggccgatgtatgcagggctggacagattgaatgtatcttgagtcccatcccctactgcgaatctggccggctcggtcgcagacccgcctttccagtctccagtccaatacgcttctactcctgtcggaaggggctgcgtgaacttgactgttccggtctgggcgttctgcaaagcataatcggtgatggtcacgggcgccccggtagtctccaagtatccagttggagtatcacccagttcgatctgagcgccccagataagcacgtcaatcgccgcgctggaattcgaatcaatccagctgaagttggtttctgcaggagctacgtaagcagcgcggaacgaagagctgacggtcttggtcgtgagaacgcaacgccaccagccattttccagacgaatcattcgggcgcttaccacgctgctgtccaacatctgatcgctgatcacgttcccggaatccaggtcgaaaacggcatcggctcgactggggaaatcggcagccgactgaattgcaatgaaacgggtggagccggctttcgcgaagaacgagaacgttacagtgctaccggaccccagcggcccatctatcggcgcggagacgtaagcggtactcccggccggcttagtaagcttgcacaccgtagcggagccgtccggggccgtagcggacgccgtttcgaccgttaccggaagaccgctcgcggccggatcgactcccggccaatcgacgtcgctggcaggggtcgatgtcagcacgtggttcgttctgggcgaactggacaacaataccataccttcccaatctttccgatatatggccaagttctccacagggccattctcgccggtcgagtccatgagatagaagtacagaccggtcgcctcgtcccacggctcatcatcattgaatatgtagcgaagcatgcgattgatatatgcaatcgagccgttcgaaatcagcgctacatatcttagctgaagcacttttctgatttcgtccaagttgagaatttcggcattgccgccaccgtagaagttgccgcccggcgatgcgtctgccggtggcggaacttgtgtaccgctatagatgaagttctggcgtagccgaccgaatgcccaagaactgttttttggatacaggccgaaccctttcgaaggcgtgccgaggatgatgcaccaaaccataaggccgaacgggttggcggtcttcaagttgaaaacgtcgcgctcccagttcacccaaaactgacggctgaaacgatcataccattgagcctttcgctgaaccaagccggtgatcccaggggcctggttttggagccacttcagcgcctgttgaatatcagaattgtacgcaggcagagtcatacgaaagtcaccctaacgttaccaaccgaaatggtagcctgaccgaatgcgctcatgacgtattcaggcgagaagtcgccgggagccggggccggcgatccagccgggacgcaagccacctggcatagtttgatgtagatgccgggaatctcgcgagcgatagccccagccacttcaaaggcagacagactcgcgccgacgaccaatccctcttcgccctccactttcccctgggcgtaattcacaactgcgttctggattgcttccggagcgaccgaggaagagccttgctgaacggtgacgtttacatatccgtcatacatgatcggagtagtccacttcacgacatactttcgaccagatgccggatcgcgaacaggaacgccagtaggcccatccaccgggacgccgttgttggccgagccatagtcccagggagttccgccgttgtgggcggcccacagagcatctgcgacggcctgcttatccggatttccggcgacgcagacccagaccgcatacggaagagtgaatgatacgccgttgacgacttgaaccgtgccggtattgttttcgatgacgttgaccgaggtaacgttgggcacggcgctgacatacgctttaatggccaaagtcgagttgcgaccttggatcgccagacgattgacgcgagcattcttcagttctgcatcggtcatttggcggctgccaggatcgacgcgagttgaagcgatgactttcgccccggcccaaccgatggttccatcgatgatgatcagatttcctacgggaagagggatgtttccatagtcctgcgattttacgtcgatggtggcgactccggttgccggaatcagaacgtcactcatgaccgtgaaaatcgctccggccggagtctgcacacgcgacccggtagaaattcgggtctggctgcggccggtcacttggacgccatagccgaacgtcgaaagatcagagccgcgctcgatccccatcagcgcacagatggcgtccaggaacgtcccgaaagacacgttcgggttgatggtgttggcgatgcgagcttcattcctcattacgctggaacgcgcaatggtctcggccgcgaccagagttccttggggagttgaggctgccaggttgatattggcgccgagggccgctctgaattccgcttcaacgtctttcaaaacgtcagcagtatcggcgactatgactccagtatctactatgtagtcataattagccattacaacccccccccgctgttaaatcagaaaaatcaaaactagccatgaaattctccttaggcaatcatgccgcctttcgtccgggcatcaggcgggttgttttcgaggtggccgtggttgttcacgttgacgccgtttacaaccagggtgttggcgatagtcacgcttccagtgaaattcgcctgcggagtatccacggtgacattcgacggcgcagtgatcttgatgttgtcgccgcgaatggaaatccgggtcgctccactagtcgattggatgaccatcgctgtcgagtcttcagaattgatggtatatcggcggaatacgtccggtatgaacataccatgctcaaatttgtggatgcggccggtgttcggcttcgacatcgatagcgactccaagaactgggaggtgtcgcggtcggccgcgtaaatccagccgatatccccctgctggatcgggaaacttatgtggaagccgccagcgcccatggaaatcaccgggatatcaaccagctgatgccgctggacggcattgtgttccgtatcgacccaggtgatgagggctgcgattttacgtcgatggtggcgactccggttgccggaatcagaacgtcactcatgaccgtgaaaatcgctccggccggagtctgcacacgcgacccggtagaaattcgggtctggctgcggccggtcacttggacgccatagccgaacgtcgaaagatcagagccgcgctcgatccccatcagcgcacagatggcgtccaggaacgtcccgaaagacacgttcgggttgatggtgttggcgatgcgagcttcattcctcattacgctggaacgcgcaatggtctcggccgcgaccagagttccttggggagttgaggctgccaggttgatattggcgccgagggccgctctgaattccgcttcaacgtctttcaaaacgtcagcagtatcggcgactatgactccagtatctactatgtagtcataattagccattacaacccccccccgctgttaaatcagaaaaatcaaaactagccatgaaattctccttaggcaatcatgccgcctttcgtccgggcatcaggcgggttgttttcgaggtggccgtggttgttcacgttgacgccgtttacaaccagggtgttggcgatagtcacgcttccagtgaaattcgcctgcggagtatccacggtgacattcgacggcgcagtgatcttgatgttgtcgccgcgaatggaaatccgggtcgctccactagtcgattggatgaccatcgctgtcgagtcttcagaattgatggtatatcggcggaatacgtccggtatgaacataccatgctcaaatttgtggatgcggccggtgttcggcttcgacatcgatagcgactccaagaactgggaggtgtcgcggtcggccgcgtaaatccagccgatatccccctgctggatcgggaaacttatgtggaagccgccagcgcccatggaaatcaccgggatatcaaccagctgatgccgctggacggcattgtgttccgtatcgacccaggtgatgaggggttggattgtagcgatattttcggcccgatcatattgaacaacctgggcgggaatcatgacttcaaagtcgagcgcatcccgccgcgaccgagcgtcaagagcggcgatcagtcgcgttctgtcggtagattttgcggatgttagaggaatattggacatgggaaagcctctgatttggccggtctagtatagccttcccaggcccgcttaggaattatccctttttgattctgttctgtgatgcttcggacgctagagcctcattcacgctcttcgccgtcatgatgtcaatcatcttaaaggcatcttgagtcgaataatattcttccagctcgcgcatagaagctgacccattcgccaccaaacttgcgaccacagaaggtgaatgggctgttttcacacttttgatatcttcgacaaatctggctggaattttgacccctgtccaatctttgaggaagccaaagttccaatctatgaccaattcagataaaagcgcaagcacttgtacgggagctattacgttcgcccggtcaatgacataaagatttatgttcgcagcggtcaagggaagccagacaccttccggttgttcctccgtatgggccaacacgtcggtccctttgagcaattcttccggaggaacatcatggattcccgacatcatcctgagtccatcgaccgcagagaattgccgcgagttgtagtgcacgccgaacatgttgaatgatttgatttccctggccattacgctgctgggctccccataactttgatatagaacggccgatcccggctggccaaatcatactctagagcggtgattacatagttgccgttgacgcttgggttcatgagagattcgaccgcgacaccaccagccacgcgaatcgacggttcaaacaggcactgaaattccacgccccattccgaccatgaagggatgccgacgaatgagttgatgttggaaacttcatccggacgaattactttgtcccgatccttcacgatcaaaatgtcatcatcgacgaacgcagccacatccggcatgtacatatcctgaattgacgccagaattgccgacgcgacagtgatcgaccggcccggattcttcaaaacttgatcattgtagctggtatcgcagatgaagttcaaccccatctcatttgcgccccattcgacaaacttaacaaacgtcgtgttggctggcggcatatttcgaatggtcttcgtcctatcgatttgccttgtgtagcactggatgcgaattccaatatccggtggcggcgaaatgacatcgacaattgccacttcgccgacaaatactctggaaacttgttcgcggccctgatcggaatagccggcctcaaccgatactctgatcatcagctcgtcttccattccgacttggcgctgccggtgcttccacgctgtgaactgcgacagaagagactcgcgcaattgcgtcgtgaggccaaagatttccagggtagctcggttttgaatccgcaatgcagccttcataatccgaacccgaacatccaggtcttcacggatgatttcgggtccatagggcatattgaacgtgactcgcagaattctctttttcatcagtagagtatcttagttgcggaatcgttttgggagtcctggatggcggtagtcagctgttctgcggtctgcctgctgaagatttcgcgagcctcttctggagaattcgcgccggtgacgttgactagcatatcaattcgaccgattgtcagttcctggccgcgctccggagcactcttcagaagcttctccccatacgtcctgagaatatccatttctcgcgatgctgcgttcaccttggcagtagcttcggcgagtttggctggagaaaggaatacattgttggcctctgtcgcagccgctttgatttcctgctgtttacccaagatggcctggttgtatccgaacagcaagtcagaacggctgatttcgcggcgcataatttggttaggattaacaccgatgacttgggcaatggctccggcagtgagttgggtctggatgttctgcttggtctcaccacggacctggttcgggaatttccggaatccagagtccgcccggtcagcgtcttggcgctgagacattttgagaatctcgccgtcactgcggtctggcatgcggtcgatgatgcgaatctccggccggaccactcggtcgtcatatctacgagcttcgcggcgctcatcttccttcttgccttgatccggagactccagccttccgccgtcataggggcgaatgtccatgtcgccaccttctggtgcgaacgtctcgttggcgacagtcatggccgcagcctt

SEQ ID NO: 27 - DNA, 42788 bp, Septimatrevirus EPa40
  source 1..42788: mol_type = genomic DNA; note = EPa40
aacgtcgaaggaagcaacgcccgcgcttgaacttgtcgcgccgaagtcgaagtaacaaccccgccccggttgcccacaagcgccggggccattcccgaaggtgcaagttatgcaaatgtcgcaattaaaaccggcgtcgcaactggcccgccgctacggcgtaaagtccgtcgtattcggtgcgcccggttccggcaaaacgccgcttatcaatactgcgccgcgtccggttttgcttgtgaccgaacccggtatgctgtccatgcgcggttcgaacgttcccgcatgggaagcgtattcgcccgcgcttatcgtcgaattcttcgaatggtttatgaaatcgcgcgaagctgcgaatttcgatacgttgggtattgacagtatttcgaacatcgccgaaattatcttggccgacgaattgggcaaggtcaaacacggtatgaaggcttacggcaatatgtccgaacgtgtaatgaaaatcgcgaacgacttgtattacatgccgcaaaagcatatcgtaatgattgcgaaacaagcccttgtcgaaaacggacggcaaacgattttgcagaacggcgaagttacttacgaaccgattatgcaaaaacgcccgttctttccgggcaaagaccttaacgttaaagttccgcatttgttcgataacgttatgcacttgggcgaagcaagcgtacccggaatgccgaagccggttcgggcgctgcgaacgaaggaaattcccgaagttttcgcgcgcgaccgtttgggcaatcttaacgaacttgaacagcccgaccttaccgcattgttcgcgaaagcgatgcaataaaacggtttacttcgccgccgtaaccaatggcgaagacttttcgaaaaggtgaaacatcatgcaacttattcaagcgttcaacgcacaacagtacgacccgacccaaggcgtcggaagcctgccgattggtaagcatccggtaatcgtcgaatcttccgaagtcaaggccaacaaagcgaacgacggcggttatctgcaactgaacttgcggattatcgacggcccgcagcagggcacgaccggcgcttatcgcctgaacctgtaccattccaaccaacagaccgtcgaaatcgcgcatcgccagctttcggcaatctgccacgtaatcggcgtgttccaagttaccgattcgtcgcagcttcacaacctgccgtttcttatcgaagtcgggccgcagaaaaacgacccgcagtacaccgaagttaaaaaggtgttcgatatgaacggcaacgaaccgggcaaggctggcgcaggcgcaccggcagcgcagccgcagcaacagcagccgcagggccagccgaacggcgcttggggcggtgccccgcagggccagccgcagcagcccgcaggcggtgccgcttggggcggacagcagcagcccgcgcagcaaccggcccaacagccgcagggcgcagcatggggcggccaaccggcgcagaacccggccccgcagggcggccaaccggcatggggcggccagcctgcccaacagcccgcgcagcagcaaccgcagggcggcggctggcaacagggcggccagcccgcgcagggcggcgcaccggcaggcgcggcaccttggggccagcgttaaggcgtaacgccgtcgcggcgtagattcgccggggtcttaaccggccccggcgtttctttttaaggagtatgcgaacttatgtcgaaaataaaagacgcattgccgacgcccgaacaatgcgatacttgttgttcgttcaacattgaactaacaacgaacgataagatttacgggcgaacttatggcaattggccgcatatttattattgcaatgattgtcgcgccgccgttggttgccatccgggcacgtttattccgttgggtcgtatggccgacagaacaacgcgccagcttcgaacgaaagcccataacgaattcgaccgcctttggcaaaccggcttaatgtcgcgcgcgaaggcttacaattggcttgcgaaccaattaggaatcgacccgtcggaatgccatatatcttggctgtcgaaagaccaacttaaagacgttgcgacactttcggcggattatttatcgaacaattacgaagcccttatgcggcgcaaggtgaagaacgatgcaaaacagcaaagacgcgaagaacgcacaattaacgctgaacgacgcgcagccgacgaaatccgacgcaggaaggcaaagcgtagaccttgacgcgcccggcgttgcaaccgcccttgcaaagcgcattaaagaagatatagacgaatattgcgttcgcacgtatgacggcgggcaccgtcggcaccttggcgcgtcgttgattggcgacgaatgcaagcggaagctttggtatatcttccgttggtgttttcgggaaaaaacggacgggcgcaagcaacgcttgtttaatcgtgggcatcgcgaagaagcgcgctttatcgaatggctggaaggcatcggcgttcaatgttggtacgaaaaccgcgacggcttcttttaccaagccgaaagcgacagttacggcgtattgaaggaaggcgaagaactgccgttgggctgcgaccttattacgaatgaaaatccgtattacgcccaacacgtcgcacgcgcgaaagccgacggcttggaattcccacaataccgcatttccggcgttatggggcacttcggcgggtcgcttgacggtatcgcccggcttcccgaacgctacggtatcgacgaacccgttttgctggaattcaagaccaacggaacaggcaagggcttttcggacttaatgtcgcaaggaatggcagtaagtaagccgcaacatttcgcccaaacttcgacgtatggcaacgaatatcgttttcgttatgttctttacctgaacattaacaagaacgacgacgacttgcattgcgaagttgtaaagctagaccatcggctaggccagcaaatgaaggaaaaggccgaacaaatcattctgtcgcaggaagcgccgccgcgcttgtcggataatccgacgtttcataagtgcggatattgcgcggcgaaggatatttgccacaagggcgcgattcctgaaaagaactgccgaagctgcaaggccgcaaatcctgtcgaaaacggcgaatggttttgcgaagttcacaacggcgtaattccgggcgatttcatcgctacgggttgcgattcttattcgccaattacagcggttgcaaagaatgtctaatatttatgttccgcgttggtatcaagacgaagcggaatattcaatattcgattatttccagcgcggcggggtcggaaaccccgtcgtcgctatgccgacgggaaccggaaagtcggtcgtaattgcaaactttattcgtcgaattttcggttactggccgaatcagcgaataatgatgcttacgcatgttaaagaactaatcgaacagaacgccgaaaagcttatgtcgatttggccgaccgcgccaatgggcatttattcggcgggtttgaattcccgcgatatgattatgccaatcgtattcggcggcgttcagtccgtagcgcctgcgattaaacgcgggcttgaagaagacgacggacgcccggcgcatcttcgccatttcggttggcgcgacttgctgttaatcgacgaatgccatttgttaagcgacaaggaagattcgcattaccaatacattatcgccgaacttcgcaagattaacccgcatcttaaagttatcggatttacggcaacgccctatcgaatgaaaatggggcttattaccgacaacggaatttttaccgacatttgttacgatataaccggcgttgaatcgtttaaccgacttatcgccgaaggctacttgtcgccgcttatcgcaaggccgacgcgaaccgaaatcgacttgtcgaaagtaggcgtaacggctggcgaattcaacagcaagcaactagaagccgccgtagataccgacgaagttgtttttaacgctgttcgggaaatgaccgaaatagcttacgaccgttcgacttggcttatcttcgcaactggcattgataataccgaacacgtcgcgaacgtaattcagtcttacggcttggaagttttgccggttcattccaagttgccttcgaagacgaataccgaacgtttgcgcgctttcaaagctggcgaacttcgcggcttggtatcggggcagaaacttacaacgggtttcgaccatccgccgattgactttatcggcgatttgaacccgacgctatcgccgggcaaacacgttcaaaagttgggacgcggaacccgaccgtcgccggatactggcaaacaaaattgcctgtacgcggactttgccggaaacgttcgaagacttggcccaatcaacgacccgcgaattccgaacagaccgggcaaaggcggcggcgacgcgcccgttcgtatttgcgacgtatgcggcgtatataatcacgctgcggcccggcagtgtattaactgcggcaccgaatttacttttgaaacgaagttgtttgcgactgccggaacgctggaaccgctgcgaagcgacgcgccgatagtcgaatacttcgacgttcaaaaggtactttacaacttgcacgaaaagcgcgacgcaaacggaaatctaacgaaaccgccgatgattaaggttagttacttttgcggcttccaaatgttcaacgaatttataatgcttgaacatccggggcttgcggcgaaacgttcgcgcgattggtggcggcagcggcacgccgaagaaccgccgccgacgacttatcaagctttgcagcgtgtttcagaacttcgcacgccgcgccgtgttcgcgtatgggtgaacaaaaagtatcccgaagttctttccgctgaatggtgaacaaatggccgaaatatcgcccgataaaaacgtagaaaagaaccgcgaattactgttgcaacgttcaatcgttggacttgcaaagtacggcgtaacgacggataataacccgttgtcgcttcgcgattggttgcaacacgcgctagaagaaacgctagacttggcgaactatcttcaagcggcaatttcgaaacttgacgaagaaggggccgaaaatgaaaatcgacagtaatattccgcttccgcccgaagacgaagcgccagccgccgaacagccgaagaaaaagccaagggcgcgcaggcaagccgcagccggaaagaaaaaggccaaggggccaagccctgcggcgtcgcttttggcggcgttgaagttcgttgccatcgcgcagaaaaaggccgggccgacgaacgttcagttcgggcacattgcccacaattgggcggcggcttccgacggggttttgaccgtcgcgcatcctatcgaagaagacttggtagcgtgcccgcatacgttgcagtttatcgacgcgctgtcgaaggtcggcgaagaactgtcgattacgcagcttaccgcgaacgcccttgccgtatcgtctggcgcgttccgggcgttggtgccttgtgtgggcttcgacgacgtgccgattaccgcgcccgacccgcaatgcgccacaatcgacgaccggattaaaacggccttcgctgcggtcgcagggcttgcgacagacggcgcaccgaatgcgacctatgccgccgtcttgctgcaagccggaagcgccgtcgcgaccaacggggcggccttgctggaagcgtggcacggtatcgaccttccgcccggcatgatgcttccgaagtgcgcggcggtcgctgtcgccaaggctggcccggcccttaccggcttcggcttttcggcgtcgtcggcaacgttctatttcgaaaacggggcgtttatcaaaacgcaactttacggcgaacgttacccgaattaccaagtcgtcttcgaagttgaaggcttgaacccttggccggttcccgacgatttttacaacggcgttcgcgcgattcagtcgtttagcccgaacggaaacgtattcttcgacgacggggcggttttgtcgaagatgcacaaagaagaagcttcgacgtacaaaatcgaaggcttgccggaacgaatgggcttttctgcgaagttgcttctttccgtcgaacatgcgtttaagaaagcgcatttcgcaccggaagcaaacaaggtcgtatttttcggcgacaatttgcgcggcgttcttatgggtcttgaccttggcagcgaagcgacgcataatccgtcggacaattacgaagacgacataccgttttaaggggctttcgcatgattaacgaacaaggctttattgttgcaaagaaaagccgcgtcgtcgataagctggccgcaagcattcggcaggctttgcggcctgtcgaatttatgtcggacgaagaactaacggcaatgcctgccggaagtgtcttcgtcttcgacgttgaaacttacgtaaatttcttttacgtagcgtttaagtcgcttgataacggaaagttcgtcgcgtttgaacgcagccccgaccatgattttaacccgacgaagcttctttggatgctttggcggttctgtatcgtcggcttcaattcgcgcaattatgacttgccgatgattgaactagccgcacgcggggcaagctgcgcgaagcttaaagaagcgtccgatttcatcattaaaagcgggccgaactatggaaccgaaaaggtaacgccgttcgcgttcgaaaagaagtacggcgtacaaattggccgatacaatcatatcgatcttatcgaagttgcgccgcttcaaggttcgttgaagctgtacgcggggcgcttgcattgcgaacgtatgcaagacttgccgtttcccgaagaccatgtattgacgcaggaagacgccgaaatagtgcggccttattgctgcaacgacctttcaaataccgaacttttgtttaacgaacttgcgcccgaattgaaattgcgggccgaaatgtcggaagaatacggcgtagaccttcggtcgaaatcagacgcacaagtagccgaagcggttattaactccgaacttcaaaaagtccttggctattatccgaagaagcccacattatccgccgatacggtcttggtttacgacgtgcccgacttcgtttgctatcaaacgacgcagcttcgcgaaatgctggaagtcgtgcgaaacgcccgcttctatcttgacggcttgggttcgccaatcatgccgcccgaactggaaaagctgaaagtaaccatcggcggttcgacgtacaaactaggcatgggcggtttgcattctaccgaaaagaaaacggcgcactatgcgaccgacgaaatcattttggcagacaacgacgtagaatcgttttacccgcgaacaatccttaatcaaagactttgcccgccgcacttgggcgaagctttcttgaccgtttacgaaaaaatcgtaaatacgcgaattcatgccaaagccgaagcggctaaggcaaagaaagcgggcgaccgcgcagccgcgaagaaatggaagaccgttgccgacagcttgaagattaccattaacggaagcttcggcaagcttggcaacaagtattcgacgctttacgcgccgcaacttatgttgcaagtaacgattaccgggcaacttgtgttgcttatgcttatcgaagctttggaacaaatcggcattgaagttatttccggcaataccgacggcattatttcgaagtatcacaaatcgcggcacgacgaagtaagggcgcttattgcggcttgggaagaatggacaggatacaagaccgaagaaacgcggtataaagccgtattcagccgcgacgttaatagttatgtcgcaatcaaggaagacggcggcgaccccgaagcgcgctttcttgacgaacaattaggcgcaaaaactaagggcgcttattgcgaacgcgggtcggccttgaattcgattctttcgaagaaccccgaaaccctgatttgttccgacgccgttgttcgcttccttgttgacggaacgccggtcgaaaagacgattaaagaatgccgcgacttccggcgcttcgttgcagtaaagaacgtgcgcggcggcggcgaaaagaacggtcgttatcttggcaaggttgttcgttggtattacccgaagaacgaagccgggtatattgcttacgtatccagcggaaacaaagtcgggaaaaccgacggcgcacgccctgtaatggacttgccgacggaatttcccgacgatataaattacgattggtatattaacgaagcggtcgaaatgctgtacgactgcgggcggttgaagaaggccaaaaccgccgcgctgtcgttcttttgattacggcggcggcggtgccgttagggtcattgtaagcgaatcgctgtacgtcgaatatttcgaattcgccgtaataaacgaatctacaataacttctagcgtgccgtacttgcccgttacgtcaagggtcgtcgaacttcccgaagtcgtaacggtcgtgtaagcgccgccgcctacacgccagcgaacgcgggtttcggtgccagcttcccgcgtgttcgccgtgtcgccataaacgcgcaacagggtatcggcccggctgcggttgcgccatgcaacagcaatcgacgttgcgcctacttgtgggcttggcgtgcggcttcctgcaagcgttaggtactgcggcggcagcggcaacccggcccggttggtaagcgacccgctgaacgacggggccaacgaaatatcaagcttgctgcccgaagtcgtatccaaaagcttaacgtatcgcgtcgttccgaccgaaacaagttccggcaacagtccgtcggttccgctaatgaaccaaacgcggtcgttcgccgcatgattgcccggcacggtatccagaacgccgcgatacacgttcgggaaggtaatttgaccgccgccattgtcaacgaagcccacataaacgaacagttcgttattaatcagcaggaaggccgaaccgtcgcgcgcttggtctagcgtcgtgtattgctgcaaaccttcgatgcttgcttgcgacacgccagttacgacaaggcttccgcttgtatcgttgcgggtttcgctggcgactgtcgaagcgtaggcgttcagcaacacgccgccgccgttgtacggggcgctttcaagcgacagaataggcgacgaactgaaattgtccggggccgtcattgcgtcgtaagaaatggacgtagaacccggcgcaactgcggcaaggtacagacgcccggcagaatcgaacgaagccggggtttcgctgtcgtcgtatccggtaaggaacgcaggcggcgtaaaaagaaggcgcgttgtaaccggcgtcgggtttgtgttaatcggcgtccagccagaaccttcgggcggtgcgaacgtaagcgaagacgacgaaaagcggtcttgtacgcaagaaagctttatttggttggacgtaagttcgccgaaatcaattttcgtaacgcgcataaccatattcgaaatgccgaacggcgaccaattcagaacgaacacgcttccgggccgcaagttctgcgccttgcggttaacggtcaagtcgcacttgtaaagcggaacgttcaaaattgaaagttggcgcgccgcaatcttgcttgctaccgttgcgtcggtaacgccgggcgtcgaaacttccgtagacttaacgcggttttgaaagttgatatttgcgaagtcttgggtaattgctacgctgtcgtcgtaactactggcgcggttcttgaacgtaacccggcattggttaaaagtgttttcccatgttgttttctggaagttgcgaagttccttaaccgaagattcgtcaagaacaagaagttcggaaaccgtgtaatcttggcgaacaagtttcgcaacaatcttcgccgttgccgggtcttgatacaacacgccgtcggcgacgcgcattacttcttccaacaagtcctttccggtaatcgcagattgaacaataagcgacatacccaagccttcgttatacagcgtttgcgcgcaggccgtgaacgaaggcatatcaatttcgctttcaaggttgccgaagcggccccatttctgcgtcattgcgtcgtaaacaatttccatcgggttaacgtccaacccgtttggcatgattgaataagtcgcgtgcaagccggacgtaatgcgctgaatttcgaagctgaaaggttccggcgtcgtacctgttccgatataaaaggctttgaacagcgcacgcgcaaagccgttgtacgccggaacattcgggccaatcttcgaaaccaagtaagaatcttgcggcgggtcaaaacgaccgtcataaaacgaaatcgtaccttgcaggccgccgcgttcgtcttcgccgccaaacaagttcggcttgttaatgtaaatatcgccggacgaagttaagttgccttcccaaacaaggtaagtaccggcccaaaacttacgaagtcgaacgccggggccaaggcacaaaatacaatcaatgccaagataatttttataaccgaccgtaactttcttcgaactaaaaagcccggtcttcattttcttacgaattggcaccgggcggaagtcgccaaaccaagccgttatcggcgatttctggcgcactgttccccacactagcggcattgggtcgccgtacttggaacgcggaaattggaagtcgccaagtttcgccgcgcgtgcgttttcgacgttcggtttcggcataagcgccgccataagcaagaaggcgacgacgaagacaattgcaatccacatttgttaatgaaccccgctttgaaatacgttattcgattcgcccggaacaaacgggcaaccgccgaagttcggttgattattgaacttggggcaaccgttggccccgttgtaagaatggtcgcaacctgccgtaacctgaatcgaagtgccgacagaaatacgcgcaaattcgtaatttaccgttagaattgccccggcttgcgcgacaatcattcgacgttcgttgcgcgcaggtattgctatttcgccgccgataaaccaaccgtcgggaaaaccgccaagcgacggaatcgaaatgttgcgaccttcgaccgccgaaacctgcgtatctagcgaattgcttacgcggcttaccttgcaacgttcgtcgaacagaacgttattgcaaggcggctgtacgtaaacgttcggtatattacccgacagcatcgaaccgaacttgcttggcgttctgaacgttacaaattcgtcgtcaaccgaaattgaagcaatcggccctttccagtatgcgacccaagttgcggcgtcgcgctggcgacggtaaatcgtcaaaaccaaagacggcggcgtagtttgaaacgcatagtctttaacgatttgttccgtaatcggaagcgtaaccgtcatatctacgttgtcgtcttcgtgcgttccgactttcagcgtactgcgcttcaaacccggaacggggttatatgtcgcactgttgaagacgtgcgacagggcgtcggaagtcatgtaataattgcgatacgaaccgacgaattcgtaaagttcaaatggcgcgctatcgcctacgctttcttctttgtcgtcgtaatcagacattagggttccgccgttcgaattgaaagattcaagattgattcaagaccgtaatgcttccattctactttatcgtcgccaaggcgtacaggcaacaagtacgaaattcgcttaacttccatccatccggccccggtcggaagcggcggattaaaaacaattatagaaacgtcttcttcccctttcgacgcgcctgttatttcagttctatgaatgccggatgctgtttctatttcaagatagcgatgcgttataatttgccaaattttttcggcgtactccgacccttctacggtataaacggaagccccgtcggacggttgcacggccaaggccaaatcggttcgatatgtgggcatccaaaacttgcgcgcctgtccgcgtgcatacgcaagaattgctttccaataatccaattcttcgggattcgaaatacgatttactttgaagcttcgcggcccgccgatgcggctataatcccaacgcgaaataatgtcggcaagtccggtttgattgtcgattgaaatttggccggttgaaacttcgtcgcgtacaaggtcgttcgcaagcgggcgcttcgtcaaaaccggcacgccgccgaactgttcaagtacgacggttgcgccgggtcgggtaagttgcgaacgctggcgaatcatcttcgcgttaatttctacttcgccgacggtatcgacggaataccgcgcaagtgctgtattgtcgtcaataagcgcaggtgaacccggaatgattaacgaccctgcgggaatgtcgaacagcaatggcgaaccaagcgtagccccgtcggctgtcaatacgtcaatttcaacaagcgcagcgacaagcggcgtttgaaccaaaacgtattcgctatcgcgaacgtcggtcttcgtccggtcgaaataaatttgaagcgcgccgctattgcttgcggcagtaattcgggttgcgtactgaaattcgggaatccaaagccgaccgactgccgacataacgtcgccgtaaaaacggcgcagggcttcgacagaatcaaaaattactttcaagcgttcttcaatacgcggaacttcgccgcgaagtgctatgcgctgttctgttccgtcaattgctacaatattgtcgcttaaccattcccaagtttcgttcaacggaacttcgggcacaatgtcgaattttacagcacgaacgccagtaatcaaaatcggcaaagggtcgccgacatttgaaaaatcaaattgcacttcaacattgatattcggcggccctgaaacgcctacggttatttcgtaagtaagttcttgaagcggcggcattgcatacggcgtagcttggccggtaatttcaatgccgaccggattacttaccaaaatatcgtcaagattcgccgcacggtcgggccatgcgttccaaacgttgaattcgcgcgtttgtgaagacgcaacggtttgtaaatccaaaagcaacggcgaaacgtgaacgcgaaaataaaaatcgcgaagaaagttcgcccgttccttacccacaatgggccagcggtttgcagcatggacgcgccaaaccgcataagggccgaaaatgcgacgcccgattacgtcaatgccgaccggcaaatattcaacttccgaatatttgtcaagttcggaagaataatcggggttgtcttcgccatatataaactgttgcgtaaatacgccaattcttccggccattctttagcttccagtgtattttatagcgtatccgtaagttccgctatgtatagaatttgaagaaccttgcctttgcgcaaggttctttctataaaatgggtaaattttccattggtcggccccgtaaacgacaagacttccgggttccaaattatcaattcgacaataacgaacgcttggcgggtttacgactatggtaaggccgccgctacttcttgacttaatgcctttcactggaacaagtacggttgccgaattagattggttcggcaaactgtttattattcctgcgcaatgcgggtatcctaaattcgaaccccgcgtgttataccaatttacagcgtcaagcccgcaatgaaaataattgccagtatatccgctgccgcttccaagcgcgtcgaagaaaagtccgccagacattccccaaaaaccgcgcgttccgccaccatccatgtttgtgctggaattcatatcgaatgtgtttccgcttccgccttgcggtatgcgactatcgtaacttccggtaaaccatgcgccggttccgccgatgccggaaatcaacgacttcccgaacgacagttgttggtagaaatccgaattgtagtttatcacgcaataaacttcgtcttccggcgaagtcattacgtgaatttcataattcatcggaaaagaaatcggcgttccagtcggcgacattacttttacgaagctagacgggccaccgttcaaggttgaaccagtttggccggttccgccttgcaacgtaagttgcggcgtagtggcgacaagttggaaaaaacaaccgttcttcgaaagaatgccgtcagaaaacgtccatccattagcgacgcaagcattttcgatagcggttttcaaatccgcgaaagtcgcggcacttccgttatagtaggccattatttcatttccaaagcgacaaaatcgcgccaagttgtacggttaacgttctggcacattacaaaagcgcgcccgccaactgctataatcgcgtctacggcttgaagtaccgtcattcccgtttggtctacgacagaacttccgcccatttgaaccacgttttcggggccattgttgaaaccggaacaaaaataaacgccgtccaattccccccaaacgttgcccattccggcgcttgtttgtaattgggaaaggattataggttcaagttggtaataatcgccagcgggaacaagcgtgttcgaaccctgcggccctgcaaggggcgaaccgcttgcggtatttgcgtttgtgtaaggatacgaccaaacttttgaccaaacgccggtttgataacgaacccacatataacaggccgtcgaataatattcgcccggatatgggaattgctggtttgcgtctgaaaaacgctttgcttcggccccgttgaacatgcttgcacaaacaagcggcgacggatattcgccgggccgcgcatagggaaagaacttgccgacgtaaaaatgttcataaaccggcgtaccaactttgaagcatccgacgattcgttgggcgttggccgttatgaaatacgtaattgcgttattgtgggcaggcgttgcgctaaactgcgcgccgggttgtgtttcgaaagtgtttccgcttacgtaaccgacgaaagttccgcaattgatattgtaataatcgccgccgacgctttgataacacttaaaccctacaaagatttcttcaagaccggacaagccaacgcctttcaaaatcaattcgcggtcaagtccggttgatacgtaacgaagcgtcgtccatccgttcgcttcggccagcgttttgataattgccaaaacttgataatggcaatcgtcgccgccgccttttgtaactgttccaattgcataacccatttatttaactccgacgatttttgcgacggtgccgccgttttgttcgatagtttccagaatgaaagcccggccttccgaagatttaagcccggccaaggccgcttctttcgattgtacgacaacggcgctaaaaggtacattgacaaccggcgcgggcgcgggttcggaattgccgcccctgcccacactagccgccattgcctgttcgtcgttgcgctgaacactggccgcgcccgtttgcagggcttgaaggtctgcaacgccaatgcggttggtcgccgatgcgttcataacgaattcttggccgtgtacgacgcccgcgacttcgtttacgcccattgacccggtaaagccgcccgacttaaacccggtattctgcgaccggatttgctgaacgttcgccaagcctgcggcaattgcagccgcagccgcagccgcgcccaacgccgggccgacgtaaggaatcgacgccatcgcagcataagccgacgttgccgattgatacgtattaatcatcgcttgcgcgattgctgcggccttcccgaccgccgccattttcttatttcccgactgttgaagcgcggccaagtttccgaagaaactacttgccgaattcaagtacaggttttgccgctgcaattcaagttgcatacttgcggcggcgtattcttggtcgctaatcaaacgctgttcgttcagcattttaagctgttcgacgtaagtttgatattgcgccaattgcgcgttaagctgcgtttgaaagttcgtcgtatcaatgcccatgccttgcaacatgctgttagttgcttcggcttggtcgcctgcgttgaaaccgcttccgctgttgttgcgcaagttctgaattgctttcagttggtcgataaactgttggcgcttgtttacgctggcgtccaacaacgacgcttcttgctgcgaaacggcgtttacttgctgaataagcaacagcttttcgcgaagctgcgccaattcggtttcgtttagaacgatgccttttgcaagcaaatcgttctgaacttgcataatctgctgttcgatttcgcgttgcttcggcagcatttgcaaaagctgcaattgctgttcaaggtcgcggttatactgccgcaacgggtcttgcgaatttgcgtaagcttccgacgccttcgttactgcgcgggcgtgctgttcctgcgtaattgcgcccatttgaagaagcttgttcgccgcttcctgcgccgcgttgtattccttcaacgggttaacagcttcggcgtaaattgcgtcgaactggcgttgaacttcggtcgcgtcttgaacggccttaatcttcgccttgattgcttcggcttcttccgacgtaagcttaatctttttctgaatcaagctttcttcgatttggtcgaacttcgcttgcgcttcgcgctgcggttgaagctggaacatacgcgccaattcgttgtcaagctgcgtattgattttttccattgcaagcgcgcgacgttccgcagccttggccgcgtttgcgtcggtagccccggcaagctgcgacgtaccggccccgcgaagctgcgcgcttcctgcggcccggcgctgcgccccgatttgctgcgaacggtcgaaaaggccgttcaacaggttttgcattgcgccgccttggctgttaaatccgtcttccagcgattgcgcccaaagcttgccccaagattcgaattcggtttggcctgcgctgcccatacgttcgaattggacaagttcgtaagccgacttaccgaccatcgcgcgaagcctgttcgcggcttcaatggctttattcgttacgttttcaatccaacccgcgacaacgttgtaagcgttcgcaattccgttttgaaccgaaataacaacttcggccattgcacggcctgcgaacgttgcggccccggtcaaaagcccggcgattgcgtcaagaacttttgcggcgttttccagcgcaccggcccaacctgtacggttggtttgaaagaatgcggcgtaactgtccgaccaagaagaagtcgaatcgtcaacgttcgaagtaatttcgccaagggctgcgcttgcgaagtcgctaagttctgcccacaattgcgacgcgatggttttaacgtcgtcgattgcttggccgatgccttcaaaggtcgcgcggaagaaatcgcccaacgtcgtaacgtcgtcgattcccaagttaatttcgtcgcggaaaagcgttagatacgcaattgcagtcgaaagcgcgacgacgataaggccaatcgggttcgaagcaagcgccagcgtaaaggcttttaccgcagccgtcgcaccggccagcgcaccggccaacggggcaccgaaggcgacaagcaatgcgacgccaagcccggcgacgattacggcaaccgtcttcaagttttcgccaagccaaagaatcgcgcgcgaaagcccggcagtaaatccggtcgctttgttcaattcgccgaagaactgaattgcattgttgcgaagaaccgtcaagctttggccaattgtgggcgtcgtcttattaaacgttgcgtctacttggtcttgtataagcttgaaagcttcaaacaaaacttcggaagtaattttaccttcggtcgaaagttccttaacgcggttaattggaacgttaagcgccttcgctacggcgtccaaaacgattggcatattttccgaaacggcgcggaattcgtcgccttgcagcttaccggcgttgaagccctgcgaaagctgcaacaaagccgacgacgcttcttgcgctgttgcaccggaaacaatcaaagccttgttaatggtttcggtcattcgcaacgaatcttcttgcgacttacccataaacgccaaggcgcggtcgaagcgtgtaaacgctgtcgccgtttcttcaatacccgcgcgcgtgcggttcgacagttcgaaaagttcgttcgtaagcgtgttaacttgttcttgcgacttcgttacgttctgcaacttgttttgaagcgtaacgtatgcgtcggcgcttgcaagaattgcgttcgccgaaatggttacgccaagaattccggcagcggttcgaatgtatccgccaagggccgaagtcgcgttgcgggtcgaatttgcggcccggtcttgcgcctgttgcagccgcagggcggcaagggcggcccggtcgttcgctgccgccgcgttggccgtctgaacggctgtccgctgctgttctgtcgctaggcgctgcgcggctgtcgccgtctgctgttgggccgtctgcgtgcgctgcgtggcgctggcaaggttggcttgcgcggttgccccttgggtcgcagccgtcgcgacgcgctgttgggctgcggcggcctgcgctgcggctgttgcggtgcgctgctgttcggttgccagccgttgcgcggcaagcgcgccttgttgaagctggcgcgttgcgctggccgatgcgttgataagctgcgacaagccgccgacgttgattgccgaaagctgcgtttgaaggttcttaactgcggcgtcggcgttgcgggcttcgcttgcaattgtgcgaagcttcgtcgaaatggacggcgaaactttgtcttgaaccttaatttctatgttttcgtcggccatttcttttaatccttaatcttgaacttcttacgcattttgcgaccaatcaaaacggcgcgttcgacgaaccccgccggggcttgtgccgaataaccgtcgttcagcctgcggatatacggaaggttgttcgtaataaatatcgcttggccgggcttcttgtttcgtaaaacaagcttcgcagaattcaacgtttcagccgccgaagcgcgttgcgttgaaccctgcgaacccggaaaatgcggcttgatttgttgacccgacggactttctagcgttacaatccagttcgacaaagcttgcgaagtatctacgggcgttttgtacgccaagtcgcccacaatagccaaagcggtatcgacggcgttttgtgacgccgcttcgtctattgccttcgctttcttttccagcctatcggctaggtctagcaggctttttgccattcgatgccgccgctttctgtttgtccgctagtttcttcaagtgttccgaatcaagctttcgcataaagtaaaacaagtcttcggtttgttcttcgtcaaactcgaaagcccttgcgtaagccgccatacttgtccaaggtatcggcgttaaaccgttgccgtgcgaccgttcgctatctaggtcgaagaaggcttgcaaatacaactgcaagcctacttcaagttctggcgcgttcgcgatgcgttcgggtaacggttgccccgcgcgcatcgcttgctttgctatcgcctgttcgtgtgggccaagttccaacaggtgcgccaaaacttcggttagttttttgcttcggcttccaaagcgctatcgcggaagttcgaagccaacttggcttcttcctgcaaacgttcgtaaacgtccggcagttcagtaagaagcgaaattgcggcgtccttcgaatacgcaatttccttgccgtcttcgccctgaacgttcttccagccgcgcaacacggtatcgacgaacacgcccataaacagcgattcggcgacttcgtttttcagcgtgccaagttcgacttgacggcgataaggacgggtcgccgcgtcaagtgcctttgaatacgccttgttcgatttgcccatgcgggaaataacgaaagtcggaacgctgccgtcgtcgttctgcgcttcgggaaattcgatttcgacgccttcgacttccttggtcgaattcgttttgaattgcttaaacagtccagacatttgatttactccgattgaatgaagaaagggccggtattacccggccctttgagtttaccgcaattagtccggcattgccagattcggcagataagaaaacacttcgtacagcatcgtatagccgttcgcgttttctgcgcctgcgggttccagcggaacggtaatcggcgcgtctttttcgacgttcagacgaccgccgcccaaaccaagcaacggaatatcgaacacgaaaccggcgttcttggccgcactgattaccgacaagccaacgtcggcgttcgcgcgaacagccttaaccgctgcgacggtcgtaaagtaagcggtaatcgaaccgccgacttcgaagttacccgccgaagtatcgaacgcgcccaacacgccgaccgccttgttcggcgtaatgttgttgttaatcgaaacgttcgcttcggaaacgtagccgaacaaggcggcggggttcgacgacgcggcgtcgtgaacggccatcttgattcggtaaacgtccgaagaagtgttgtaagcatcttcgccgggcgcaggcacgcgggttccggctttctgttcgtcgccggggtcgccgctgcgataagtgttatcgcacgcaacaaacgaaaggtcggcgttcagcttgtcggcctgcggaatgttcaacgtaaattcgttcggtactgcgccttccaagtattcacactgcgtaccgttcaaaccttcgcccaaggtgcgttcgatttgatacgaacgacgcttgataagtgccggggtcttttcgttcttgataacagttccgacgaaaagacgaaccgacttgccggttccggtttcgttgacggcctgccaagttacgtcgtcgaaaacaagcgccttcgctgtaaccgacttaatgcgggcatagcccacattattagcgaagcggtttgccgtcgcatcgccgccgacgaagacccaacgaccggggaacagttcgggcatggtcgtaaagtcgccagcggtaacgataagcgaaacgacgttgccagttacggcaatgttcgcgtctgcggcggcaagttggcgaccgacgcattccagcttcgcgcctgcgggcggggtttcgtcaatcagggtttcagcaacaacgacgcccgcagcggtagccgaaacgacggttttaaggccgttgttcgccgcgttggcaaagccggtcgcatataccagcatatcggcaccaaacacgccaagcccggaagctgcggcgtaagtgctgtcaactgcggtaacgccggtaagcgcaaccgatgcgccgttaagcggctgcgtcgaaggaagttcgcgcgcgtctgcaaagaagaaaccttgcagaattcgcgtaaggttggtcttcgtaaagtccgtgttgaatccgcccgatgcgtcaaggtcggtaatcgtgcctttcttgttctggcgcgacgggtcaataggggcgcgggcaacggtcgaaagttcgccgccgaagtccgaatagctgttgggttccagtccgtaccaaacgggcgtcgtcggaagttgcttcaagcattcttcttcggcgaaggcaagtccggtaatgttgctgtcgattttggcaatttcgcataccatgttaagaactccttaacctatttcgtcgtattcaaattcggtaacgacgttaaaccgttcgtaaagttcttcgggcggaagttcgttaattcgcgtattgcgaaaccaaaccttacccggcgtcgatttcccgcgaaaagcattacgggaaagtttcgccaatttctgcccaagttcgaacgcttgcgtattcgatttcgggcaaaagatttgtacgaagacaagacccgacgccgtgtattttctttgccccggtactccttcgcaggttgaaagggttgcttgttcttcaaaaacggtttgcttcgacagccgaacccaaaacttcgaaccgtccggcaagtcgcgatattgcacgccctgccaacgaatttcgggaatataacccgcaattgccgcgcttcctgcgttccaagctgcaagaaaaagcgcgtttacttcgtcgttaacttggtcgaattcaatcatgcttgaaataccatcgtgtaaagtaccttttgcccgttcggcgaaagtacgtcgatataagccaagcgaagttcgaccccgttacgaattacaacgtctttcaaattcggttcaaacggaacattgcccataagccccattacggaacccttcggaacttcggtgcctttaatgaagttgaaggtttcttgcgtctgccggtcaaccggcaaaaagcaaatggtaacgtctttgtcgtccggcaatgccgggccgggttcccaaggcttgttcgggtctgttggcgtcgcgtcttcgataacgcgccatttcaccttttcgccgttctttgcgataaggcgttgcgccgttttaattgctgcgtcgaaacgtgccattcgtcaaacccttattgtacgaagcgcaaacttgttcgaagcgcattcgccaaacagcggcgcaagaagcgcgttcgctgcggtaaatgtgggcatgatgccaaccgacaacgggtcggcgtattccgtttcaatcggcccgaccttttcgcgtgtaacgtagtcttgcggcgaaacgttcggttgaaggtcgaagcctgcgttaatcgccattgcaagctgaacttgcgcggcaataagcgacttcggaataacgttcgacggtacttcgtcttcgttcaggaaaacgccagttcgcggccattgtagcggctgcgtcgtcgaagtcggcttgccttggaaccggcaagcctgcgcttctaggtaatccgtcgaacgaatcagcatggccgccaattcgtcgtcgtccaacggaagttcaacgccgcgattcgaagcgtaaatgcgcgcgtctgcgacgcttacgtaactgttcgcgtttgttacgccgcttccgtcttcaacaacgattgtaattgccatgcgtcaacgtccttacgaaagaacgatgccggttacaacgccgttcgcaacgctaacggttgcggtcgtcgtgtaagtgccagtaaccggaacggtcaaggcttcggcgtcgttaacgattgcctgcgttgccgtaagcgcctgattcgggattgcgtcggggtcgataacgtcaacttcggaataaaccgaaggaacagtacccgcgacgtaatccgacggaatgattcggtcggtttcgccgtattcggcatttgctgcgccgttggctaccaaaacttcgtattgcggttcggcggctgcgttaagcttcgcaatgtcggcaagttcgccagccgttgcgttaatgcctgccgtgaaataaacaacctttttcgttgccattgcgaagactccttaattcgttgttgaaacggcctgcccacaataagcgacaggccgtccgttcgttactgcgccgggttggggttccaagccggggcgctgccgccctgcggggctttctggccctgcgccggggtctggccctgcgtagcggctgcgggcttgtcggcggccttgccgctggccttcggtgccggggcgtcgccgaccttcgaagcaagggctttcagttcggcggccttcttcttgattgcttcgcccgcttccgggtaagcgtcggcgtacagcttcggaaccttgcccgctacgccgtcgcagatttccagcgaatgcggttcggacggaacagcgcgggcgttcctgaacataacttgcgcgttcagttcggcggcggctgcgaagtcttccggggtcggtgcgttgccgtcaacgaagaacagaatttttgccggtttcatcttcgaaactcctttgaatttgtgaaggactagaagaacggggccgaagccccgtccgtctgccgtccgttagtgaacttcgacgacaacgcccgccaaatccttttcggaagttgcgtacttgtcccaattggtcgaagtgaacaacgccgcgtcggtcggcgacttgccgccgttcgccttgtcccaagcgaagcccttaacgccgacgttgtacgaccattcggcttggtaagtccgaataatgttttcgtcgccgttcttggtttcttcgttcgcgtcgaagtcgttgttttgaccaatcataaccgcgcccggcacaaggccaaggatgcgataaacgttcggcgtaccggcttcgaacaggttgggcgaatcggtcataacaagaagcttgccgaacgggtcgcgaacaacgttcacggtgccgtaagtaaacaggcgttcggagttgttcaggttgttaccgtacagcttgtgcatgggcgtactgtgcataatccatgccgcaatctgcgcggattggtcgccgaacttggcttggccgttgttaaggttgttccaagtcgggccgtcgtcgggcgcagtattgccggtcgcgtcgtaaacaacggcggaaacctgcgacagcgccgaatagaccgaaccaagaccgacgttcagcatatccgccatcgtatcgacggcgagttgctgccccattgccgcgcctgcgacttccgggttctgctgaatccaacggaattggccggggtcaaggcgaacaggcggcgtaccggctgcgaccttaaccgacgtatcgacaaggtgtttcaagaccttttcggcgacggtgccggaaccgtaggcgttacgacggcgaacaaggccgcccgttaccttggcgaaaaaagcaacgtcggaaaagtcgccttggtgcgctgcggattgcagcatgatagccccgcccgtcgcagcgttgaacaaatcaacctgttggcgcagggtttcggagaaagccgaataagcgtattcggagtaaacagcaaggtcggaaagtgccatgattaagcgtccttagtttcggttgccttcgcttctttaatgaaggccgcaagttctgcgggattcatcttcgaaaggtcggcgggtttgtcggattgaccgttaaatttcggggcaccgccgccgttctgcgaaggcttaccggcaccgccggacgccttactagccgtgataatagcagaaaaatccttgtttgcaacgaattcgtttgccagttcgtcgatagtaagggccgacggcttgccgtccttgtccagaacgcgcgtaaccggcgtgtcgccttcgaagtctgccataagccgcgacttgatatgcggcatgataagcgccggggcgttcgaaatcttgtgggcaagctgcgacgcgacgttatcgacaagcgttttcgtcgtatgcgcggtaagcttggaaaccttggcttcgtattcttcgcgctgtttgtcaagcttcgattgccaagacttttcaagcgtcgcaatgtcacctttcttgcgcgcgtcgtcgccttcgatggattccagccgttcgcgaagttccttcgcttccttttcggcgtctttgcgcaactgcgcttcgcggtctttggcgcgcttcaaagcgcccgtatcttcgtcgccctcaacgtcaaggcggaagccgtcgccgtcttcgatatattcggctttcagtgcgtccgaaagcttagcgtgttcttctttggtaagtttctttttcagtgccatttcaaggactccttgcggttatgccgattcaccgaatcagcgggaaagaatttctttaatcttgcgtcggaattcttcgtaagttagcggcctgtccgcatcatacttcggaatatccttcgcctttaagcgaccatcgcgcaaagcttcgccgccttcgtcgcctaatatgtcgtcttgcacttgggcaggttgacgggcaacccaagtataaaacgtttcttcggccaagtcactaacggtatttgccggggcaacgtgcgaccggcaacggatatgcgcgggcggcaacggcccttcgccgaagcgatagattcggcgatttcggcttatgcaaatgtccgttgttcttccgtcgattaccgaataccaaacgtaacgaccgaaaaccgcagacataacgccagccgcaacgaccgccgcaacgtgcgcggttgccgtatggattaccgaagcggcttgcgcgttgacccggtgcaactgcgacggcgtgccctgcgctgcggttccatcgccgacaagtgccgttaaggtttcttcaaccgtccaacggttcgcccaagctttgcgaatcatgctttcgacgccagcttgtgccgaattcgtaaacgtctttataaacggcagcaagtacaaaccatttgccggaattggcgtattcgtaacttgcgaccaaatacgttcgtcgcttcctgtaacagcagccaaaccgaacaaagggttcgaatcggcgttgggtacttctaaaagaaactgtatcgcttcttcgtccgaaataatgccgtcgctttcttcgccgtcaagttcgatataacccgtaacccatgcgcgccggtttacttccaagtcggcccgcatgaattcctttaactgttcaagtagcgtttgcgtgtatgcgctgtaaatcttcgattgcgattcccgtaattccgaaacaagcttgtttaactgcgccttcgaaagaccgtcaagggtcttataacgaacacgaccaagaaggcgcgttagttccaagtttacttcgcgaagtacgaacccgaattgtcgggactgccaaactttcacgtcttcgacgtaaacagcaaggcgcgtcgcaatatcgtacagtcgcttattgtccgatagtgccatgattgcgccccttatttagtgctgcccacattatcgccgccgctgccatcgcccggcacgttggccggggtcgcaagggccattgcttcggcggtatccttggcgattttttctttcgccttggcgtcgtcttcggttgcgacgccagctttacgcaagccggttcgcatttcttcgaaggtaattgcgcctttctgccattcttcaacaagcgaacggcgttcttccggcgtcatgcgggcaatgtcgaaatctgtattcagttcgaacttaacgccgctgtcggactggccgacccaacgggccgcccatttcaacgcccattcgaaggccgccgaaacgttcttggttgcactggaaagcgtcgaaccttccgaagcggcttccaattcggcttcggttgccgtgcgttgcacttccttttgttcgacaagctttgcgccaagtgcgaccatttggcgttctttggtatccattgcttctttaagcatggtgttttcggatgcttgaagcaacttcgcgtcggccccggcaggaagcggaataccgccgcgcgaaccgaagttaaccgaacctttaagaacgttcgtaacccattcttcggtaagtccgataagaaccggcgtcggctgtccgacgatataacaactttcttcgtaatccgccgaattgcgataatgcgccatattcagcgacgcaaggtcgtaaaagttcgggttgtccgggttcgaatcgttgttttccgaaccgatgaacataaacggaatttcggtaagacgattgccgtttgcgtcggttggtttgtaaacgacgtgttgttggtaattgcctttcggaatcttcgtgccatcggctttggtcggctgcggttcgcgccaaatttcatggacgtaataaccttcttcgtccaaacgcaaaacgcggaattgccccgacgttttcatttcaaaaccatcatcggcagcgcaccaagtttcgaacagtacgaccaacgacaaaacttcttccgcgccccggtcggtcgttcgccaattgataatttcagtcggcgaatatacgtacagggtcggacgaatgcgcccggcttcaaggtcggcaatcgacgcgccgccttcggcttcggtcgtcgggtaatcgaccaacagcccggcgcgggaatacgcaaggttcagcgatacggcctttttcgcaagctgcgtaaggttgatacccgaacccgtcgcgttggcgacaagcgggttcaacagcgcgggcacctttacaaccgggtcgcgcatgaacacttgaccgaccaagccgaacaaggttcgacgggctacgttatagaaaacggcccgcttcaagtacgcttcgtaacgcgccttattttctttcgattggtcttcggcgttcggcatcggaagataagtcgtccgcgcgccttttaccgttggttcgcccgcgattgcgtcgcgaatcaggtaatacagcggcagcagcttaccaagttcggggcgaataaatgaaacgttcggcatgatttgggttcctttaagttggcataacaagtttgaatttcgctgccgctttgttcgcgcctttcaatacgcgataacgcaccatatcgtaacaatggtcttcggcggttgtgtctacgtcgtccaatttcttttcgtcgcgcggcagtgtgggaagcaaatcaatacttgcaacgcaattcgacataaagtatatacccggcccttcgcgattaacagacgcttctagccggtcgcggaaaagctgcaacccgattacgcgcgaacccggcgatttgtccgattcagtccagcgaacgcccttcttcgacataagcttttcggtcgtgtctaattcgctgtcgattacttggcgaatgcggttgtcggcagggccgggccaaggctgcgacaaaatccagccgttcgccattagcgaaatttcgcggtcgattatgccttgtgcgatattcgacgccgaaagcttcaaacctttattcggtatatattcgcccttttcgtctttcgcgcatccgtaccattcaaacaactgaataagcgaaccgggttgcgggcaaaacgtaaattcggtgccatccgaaagaactatggtcgcttcggtgccgtccgcttccgcccaccagcccacactaaacggatgcgaagacccgtcgtcatatgttctgtcgattcgccagcttggcggaatgacgaagcgcggtacaacgtgtatatgcgattgccaaaggtcgtcgattgcgccgcctgcggtaacgtcccaatcgccgtaaagccaagccttccgcaagttcggttctttgatactttccagttcggcgatatacgaagccggaaggtatgggttttccttatacgaaccgaagatagcgatttggctaattacgtgcgtttcttctttttcggtcgccgggttgtaaatctgaatttcgcgacgaactacggtgccgcgcggggcaattgtgataaagcgacgttttacccaattatgaccggggccgcttgggttcgttgtgctgaatacttcgcactttacaggcggcagcggttcgccgttcggcgtcaaatagcgcccggttttcgggtctttcggcgtgtcttttatcgggtcgaacgtacagcggttgaccgacataaatttgtcgtaaaggtcgccgcttggatgcttcgtaagttcgttccaaccgataaacgggtattcgtgaccgtggaagccttcgtaatccgacagcttcttaacgtgccgaaacaacagttcttcgccagtcggccaaacccatttataagccgacgttgattcgtaaaactttccgccgtcttttagctttccgttatcgccgaaccattttttcgattcggcaacaaggccgcccaaatggtcaaattccaaatcgaagataacgccgcgccagaacttgccgtaacctttgccgacgttacgataaaagcgcataagctgcgtaagcgtcttgccggggccgcgtgcgccttcgtacagcgtatgcgctgccatcgaacaaagggcgatagtctgcgaccccggaaggggcttaaatacgacttcatacggaacaggtttcgccccgttcgtatcaatggcgagtgcgtgcattttctaacaattcgcgctgttgccgtgcggcttccgcttcccattcgctttcgttagcgaatacgggcatttcgacgacgcggtttacgttcgtcgttacgttaacgttcgtttgcggtttttcgatgaacccgcgaacgtcggcataaagcttggcaagcttcgcgtattcttcgggcgtcggcggaatggttacgccgttcggaagcgtcgtaccttgcatacgctgccaaatgtcgcgggcaaggtcgcctttgcccggaagaaatgccatatcgccgccttcgtcggtaaggcgcttttgttcggccttaacttcggcgtcgttcggccaatggttcgcaacccatagcgcgcgattcgtgttgttcggaaacagcgaaagcgcagccttaaacgggtcgcgttctttcaaaagaagggccgcgtatgcggccttttcttcgctttctttcagttcgtcggacatagtgtcggcctagtttatacgtcgttggcttcactataccgcaagccccgcgttctgttaaggcttgtccgcagatttaggcggcgactgcggcccgcaattgcgttcgacggcttcgttatggttcagaatttgccgggccgtgccagcggtaaagccgtcggccttcgaaatccaaataggcgcaacccatttacaagccgtgtcgattacaacgggcttcgtttgtactgcgtcggcgatgctttgcggttcagtcgcgcgaccattcgtcgcgcagccgcctagtaacttcgtcgtcgtcaaaagtagaattatcggaagcaacgtctttcgcattttgcaccgcctttacctgttgttcggaagcttcgcgggcttcgttaacttggcgaactgcgattgcttcgcggtcgtttgcccgttcgtttgctgcgttggcttcggccttggttgcgccggacttgcgaccggcataaaaaatacttgccagcatgacaagacccgcgccgattgcggcaagccatttgccaaacttggcccaaattacggaaaacatacgttgcccctttacgcttcattcgtcgaaagttcgccgttcgacttcaacagcggcagcgaatagcggtcttcgaacggaacgcttttaactgcggctttgtttcgccagaacgacggccagaaatagccggttacgcgggatactgcgaacggtgcgatacttacggcgttcgactgattaccgccaagaaccataagatttccgcgcgcatccttgcccacaataaaaccgacgtggccgccgccgcttcgcgtgaaggtcacaagcgccccgtatgcgggccggtcaagcttcgtaagctgcggggcttcccatgcccgcgccctgtaccattcgcgaacgacgtagcgcccggcaacgcccaagcaatagccgacgaacagtccgcaccaaggcgtttcgtcgtcgtgccaccaagcgcgggattcgttggaaaattcgcccatgcggtcaagcatggcaagaagcttcgggttatgcgaagtcttcgaagtgtcttcgcgaaggccgatatactttcgggcttcggcaacccaaggaagttcgttattcatcggtcggccccttgtacaagttcttttgcttgacaaggcgggcaacgatggaaagcgcgaagacaacaacgccgataagcggcatatactgcggcggaatcgacgacttcaattcgtgcggaagaattgcccaagcggccaacgctgcgtcgggaaacgcaacaagaaggccagtaattgcggtgccgactgcggccagtcgaaccgaccaaaagcgccagcattcgcgccaatcttcgataagttcgggcttcttcatttgtcggcctttttgtctatcttgtcttcgatacggtcaagctttgcgaatattgcggcaatatcgcggttcatatcgtcgcgctttacgtagtgcccggctacaagaacttcgatattgccgaccttatcggccaactttgaatcttgcgcttgaagttctttaagcgactgccacataacgcgcatccaccaaccgcccaacgcgccaataattgcgacggctacgttaaaaaattgttgttcgttcattcacaagccccggccccgaaatgtatttggccgaagattagcacggattagcacaaattgacaagaaaggcaaaagaaaaccccggcgcaatggccggggtttccgttgaagcgtaggcgtagggcgggccgtagcccgcgccgttgcttacttggtgcgccagacgcgcgcgccgccttcgaccgaacgaacaacgaacttgcgggtttctaccatgacgggcacggtttcacccttcttgttggtcttggtcgcgccgtcttcggaaggcacggcgaaacgggcggttgcgctggaaacggtcgaagcaagcgacttcgcggcgttcggcttgtcttcgctgttcggaacgaagaagctttggccgacttccagcgcgtcgaacggatagacgttgccgccgcgaccgcgaccgctgccggtcggcattggtacgttgtcttcgatggcgaaggaagtagcgaccggggcggaagctgcggcggtgccggtttcggtgttctggttcatttcgtcgattcctttttgggttgcgcgggttgcaatttcgcccgcttcgttggttactgccgggttgatttctaccataccggcttcgataagcgggccatgtacggcaggcgaagtatacaggccattcggcccggctgcaacaatttcggcaaggccgataaccggggcggcggtgttcttcttcgcggtcgatttcttggtggccattttgtgtaactccttgacgttaaggttatgtcgcgttgttgcgacgggttgattttacgccgaccgttcttcgtgtcaagcggtcaacgcaaaatttcttcgatttctgcgatgcgttcgggcgtgcattcagaatcgtaaattttgtcgtaatccggccaaacgccgttcgctacgttgtcacaatacagcaggtgcgcgcgggcttcgtcttcgaagtccatttgcccggccataccaagcaacgcgacgaaggcgacgattccagcgataacaagaagattgcgtttcattgtgggcacctttgttcgtttcgatggttgaagcttacgacggcttcgaacctttgtcaagcgaatttgcgacattttcgtaaccgacttgcgcaatacgttgggccataaggcaagcgttctgcgcttcgattaacgacgacaacagcttatcaagttcgcccgcctttggcaagcgttcgataacttcgatttgcgcttgaaggtaagcgtattgcatcgaaagggcttggtacattgtcggcgctgcggcaagcaagttatacaacgccgggtcaacggtaacacgcggcccgaatgcgacgaagcttccggcttggttgaacgggtcggccttcggtgcgccgatatagttttgcgtcgtcgggtcttgatagaacaacaagccttcgatttgcgaatggtctagcggtttcatgttcgttaatccattgtaaacaggcattcgacgcccgcttggttaaagatgcgttcggcttcgtcggcagacgcgcgccagtctggcgatatatgcccacaataagcgacgacgcgacggataccggcccgaacgatgcggtcggcacaaatggcgcacggaaacagcggcgaaacgtacagcgtacacgcggacaagtcttcgccgggcgcagcctgtcgaattgcgttgtcttcggcatgaattacgacggcgtgttgttcgtcgcgcatcatgcgtagaaatgcggcgtcgtcaaagtcgcgcggcggcccgttgtatccaagcgacgcaatcgaccgattcgggcgcacgatagccgcgccgattcgcttgcgtggccccttagaccatccggcgacgtgttcggccagttcaataaagcgggcatcccatttcggcagggccgcgcgcggggcatagattacaggcatacccggcgcgaccgttcgaccatagcacgttcgctaatgcggcgcagttcttcccgatgcttgcgggcttcgaacgcttcaaacagcgggcgaacgatggcgcgatgaatcgcaagggcagcaacgacgcaaagtaagaaaataagtacgttcataataagcttcttcctatcggtaaggcttctataagccgttcgtattccttgcgcttatcttcgtataaccttcgttcgttgtcaagcttctttttccaacgacgataaataattgccgaaactatggtttcggtcacgcttacgacgattagcacaatttcaagggttgaaagttccattattcgtattcaaccgcccttaacgacaagtcgcctttgaagtttacgacgccgtgccctaagtcttgcacgatgaaaccgcccgacacgtattcgaagtcgccgctttgcagcatttcgcccgcgtggtacagcgcgtcgcccatgcgggccgcctgcgcgggcgacagggccgtaacggtcgcggacggggcatcggggccgttggcccggaacagggccgccagcatgaagccaaggacgacgccgacggacagggccgcccaaacgataagccaagacattttcgttactccttcgttaatagcaatcgtaatccggttcgtaatccggttcgtaatccggttcgttgtcaacgtccgattgcgaatacgaatattcgcccggccccgcttcgtaaagcttgtcggcgattgcgtccaagccttttggaaggtctttataatcgacttcttcgccgtcgataaagtacgtcggttcgcccgcgtcgctttcttccgggtaacaatcttcgggcgggccgctaatgtaagctggcgcatacgatacgccgtattcgcacgacaaaacgcgaccgtcggccatttcgaattctgttgttacggtatatgcgggcatggtcgttactccttggttcgttcaacttacgaagaagtgtacgacagcttcgaagctacgtcaagcctttttcgcaagttgcagcaacgccgaagccgacgaccgtttgccgacgcatacgttacgcggcgtgcattcgcggtacagcagccaataacccggcttcgttacgacgaaacagcgtttcgaacgcgcaatgctgcgggcttcgtctatcaattcttcgtcggtctttttcattgttcgccccttatcaagtgcggtcgatacggcggcaacttcgacgcgcgatacagcttgccgccttcgacgtaataccgttcaccatagcaaacggacaaatgcccggcgatgcggtcaaggggccagcccacaagggccagcgccgcagcctttaaccgggcgcgggttagttcgcattttaggcaattcatgggttcggccattcgatataacttcgaaggcagcttaccgcgtgttcccaaccatagcacacggcccaaccgtagccgacttcgcgggcgtattcgccgaagtcccgttgttcatccgatacgccgccttttgctgtttcggacttcgggcgttcggtcggcttcttcatttcgatataaaggccgtgccaaccggcgttcggccacggcaagaacgtatcggcgacgccctttcggacgccttcggccttggcgttcgccccgcgcaccttgtcgccgtggccttggttgtggatagcgtggaaccattgcagggccgggactgcgggcggggcgtccgggctgcgcttgggcaaggtgccgccattcgaccattcgtcggcagcgtcaaagccatgaagatatgcaacggcacaataggcaaaaagtgcggcttggtggccgtgttcggtgccagacttggcaagggttgcgggcgtcatgcgataccccttcggtcacgacagcgaccgcagctttcgacgacttcgcccgttcgcgggtcggttacttcgacaacgcgcgcgaagtgttcgccgcaaaaatcacattcgcccggacggcctgcgggtatcgctgcggcctttcggcaaagttcgccgaccgtaaagcttacttcgttttctattcggtcggctgtttggtctacttcgtccgccatgttctttcgttccccatgatagaaagaagccccgactatacaacagccggggcgctttggttagtgtttcgtcgcggccccgccttcgcgttcggccattacacgcgctacggcctgttctggcgtttcgccttcgcgcagttcgacgcggattgtttcgaccttgacgccgcgcccaagggcggccaacagggcgtcgggcagttcgccccggtcgttcagcaagtcggcggagttctgcaagcgcgcgacgtgttccggctggaacgcttcggggttggcttcgtgtacttcctgcgcgacttccagaacatcgcccaaggcttcggccagcttttcgaccaagccaaggattttggcgcggtcttctttgttcgggccggaagcttcgacggcctgtttaatatcgcatacgatgcacattgttataactccttcaaaaatgccgggttgcgcccggcgcgtgttcgaatcatacgacgctcattcgttagttgtcaagctgcaacgacaaacgcgcgtcaaccaatgctgctagtttatcgggcgtcattgttaagacccctattcgtcgttttgacaatagcaacgatttgtaatttcgccgcaatgcgtgcaaatgccgtcggcggcaacgttgagaatatcagcgcgcacgctgtcgcacatttcaaaagttcgcaaagcattgtttaaaagcttcgccgcttctttcaaatattctatttctttttgattagccattgcgaagactccttcaaaaatgccgggaagcgcccggcgcgcttttggttacttccaaagacgaccggcgttggcttcggcggcgcaatgttcggcggctttggcaacaagcttcgcgacttggtttacaacgttcggaacttcaagcgcgaaagcttgcgccgccaattctacggtttgcccgttggcctttgccactacggccaaggcgtcttcgactgcgatttttacgaaggctggcgaagctacgaagttttcggcggtgtaagtcatttcggcggttccttgtgttcgttggtatgggtctatagtacgacggcttcgacagtacgtcaacccttcgaacgaatttttttttatccttttcggtaacgaagttgtttcgtcatttcgcgcagccttgcgacgcttacgccgccgctactctcgacacgaataaagccgctttcgcggtcatacgtgaacgacaacggacgaacgccgtaaacggccttatatgcggcggcgtagtcgttgaacgcctgttgaacggccttcggcacgcttccagctttgcggcgttgcttcggcactttatggcctgtttcgagttcgtacattagaaagccgctgtattgattcgataaagtgcggcgctactgtcgataagttcttggctttcttcgtccgacaatttacgcaagaaaccttcggcttccatcgctaacagtccgtcgcgaattgcagccgttgcgccttcttcgttcttgcgaaaagccgcaatgcttacgacgcggcgttgtatgtatgcataaccgatacaacccgccgcccttgcctgcggccccttggcgtcgtacttgaccaattcggcttcgtccgcttgcaagaattcagaaacaacgcgcttcaagtgcgccatttgttcgccagcaagcgacggcaagtctttagaaagccgttcggttttcttcgggtcaagcgacgtataaaacaacgaaacgtcgtcattgttgccaagcctgcgaacttcgcaacccgcttcgccgtggtcaattacgacaattcgtttcggcttataactttcggccatctttcgcaacatgcccacattgaagccggggccgattgcgaaagctttgtaaacaggaacgcgggccgctggttccatcgcttgcgcgtgccgcatgtattcgccgccaacgtgcgacggttccagccattgcgattcgtcggccttctgcgcttcgtcttcgcgaacttcggtttcttcggtcatgttcaaaactccttcggttgattggttcggcaagcatagcgcagggccgaaagcgtgtcaagcattattcgttatttttgttattagatgaaccttatacagattgaagggttcttatagtccttaagtccttaataaataaagaaatataaataatataagatatataatacctaatttgtctagtataatgtataacaggctgtctatggctaagcaagggttttctaccctactttctattattgttatatttaagggtagactgccttatatttctatgaaggcttataagttctttagattcaaggacttacgcgcaaaacacgttcaaaacagccttatacgtataatgttaataagaataacaaataacaagaacaaacaaaaaagaccgccgaagcggtcaaagtgtgaagcttagaagttccaaggcttcgcgttgcgttccttggcgacttagaacgaactttgttttcttgctggcgaagtaatgggcgaacatggttgttactccttcgttgtttgcttcgatggttcaaatatacggcaacttcgaagcttcgtcaataggtacgacgaacttttttacaggcacgaaaaagccgcccgaaggcggcccgttctgcccacactggcgggcgcgcgttacaggccgaaaacgcccggatgcgcgaccatgtatgcaacggcgcttgttccgtaatccttcgccagtgtggcccggcttacttcctgcaaatcgccgcgttcgcaaagggtcttcaatgcgcgcttgattgccccgcttgcgccgatgcggtctttacgaaagacggcaacagcggcaagcctgcgttgaacgtagctgtacggaacaattcggttcgaatgaaggtttgacattccttcgcctgcgtacttcgcaacgtccggccaaggtgaaacgacgaaatctttaacggttgcaataaccttcgcaagctgtttcgtttcgtcgttgtctatgccaatttcgccagcatcgaaccgggcaagcaagttgcgaacgtcggcgacgacaaggttaatcacccaagacgcaacgtcggcggtaatggttgggtcgtaagggttgcagccaacggcgataattccggccagcttcaacgcctttacgtgcgcccggttccaaaggtgccgccgaacttcgcggtcgcttgtgttaatgttcgcgtcgcaatgcgcgtcgaattgttggaacagttcgcgggcggttgcgtcggtttgaacgtgaatcgccttatgctggctgttcagcattagcgcatgggcgcacaaggtcgaaagcctgtcgataagttcgaacgaaggttgggccgacaggtgccccggattcaacgccgggcgttcgccgtggtattcaatcatcgtaaaacgcggcaacagaccttcggaaatcaaaccttcgtgtaagccttcgtaaaacttttcgggcgtcgattcgccaagcaaggtaaaagacggggccaacactgcggcggtgttcttgtccttgtctgaataaatcgaaggtcgaagtaccttgccttcgcccgacttgttgtaagcatccaacaggaagcgacgaagcccggtaaggtgcggcggtgcgttgacgcttgccatttgttgaaggtaaataccaaattcgccgaccaacgaaacgaacgacgttggcccgcgcgacatatacttaataatcgcttgcgacgaagcaatttcgccggggccgataaagtccgacgcggcgggaacggttcggataacctgcgccattagcttatcaatgccgcttgcgatggcttctttacctgttccggtcggtgccaacaacagaacgtattgattaaggccagtgccggaaatgttgtacgccctgcccacaataccggcgaccaaaccaagggcaccggccaacgcgatttcgggcaccgggcgcggcgcttgtgcgtaaatgtattgcgcgatttctccgactaatccgggcggcacgctatatacctttgaagcttcgttaaggttcggggccggggcttgcggatgcggcgtcgcttcgctgttctgcgacaacgcggcggccctgtcggcggcttctttctttgctattgcttcgtctaacttgttgcgcaatccgtcaacgtcaacgggcggcaacatgcggtcgaaacacttgttcagcatgtacgaaacgtaatcgtcgcgttttgctttgtcacgctgccccaagcccgacgcacgaaacattcgcgaaatctgcgcccggttctgcgtataaaacgcgataatatcgaccaaggcaaagtcggcttcggattgcgaagcgtacatgccttcccatttgcccgcgtacagttcggcgaacttgtcgccattggctgcggcgactgcgcggttataaacctgttcgtcggtttccttggcttcggcaagcccggcgtaatgcgcgacggcaaccgaaccttgccccatctggccccaaagaacgttcaatagttcgttacaatcgttaatcggcgcgttgcggtaaacatcgccggtcatggtcatataacgaagcgaagaataaacttcgataaacgaacgacggcggcccgacggaatcgcgcccttgacgatgatatgcaaccccgaaccggaaggcgaccgttcggcgtagctgttgaattcgttaaaaatctttatttgacggtcaagcgccgtttggtcgcctttcgtgtcgtcaaggtcgataaaagaatacgggtcgttttcagtcaatacgaagccgattccagcataccaaccggacgacatagcattaacgcattcgtcgaacccggcccaagtgttcgggtcggttacgctggcaaggtgcccggtttttgctgaatacggaaccttcgtcggtttctttgaatccgtgtcttcgtatcgccacattacccattgcgggtaaatccgcatttcgtgcggaatattgttaaagtccattcttcgccaaccctttgtcaatcttgttataagtcgtcgccgttatgttcggcgcagaattggcaagcaaaagctttcttataagttcgtgcgaaacgttgcattgcgcggccagtgcccgcagcgaccgcccgacgcttgctttctttacccgcttcctaagttcttcaatgttcataacgccaccttctagcaattgtgggcagcctacccgccttcttgcttgctgtcaattgttgttgacaggaaaggcgcggtcggttacagtgctggaacgctgcggcatagggcagcagcatgaccaaaggggcttcaaagatgcgagttttgagtttatttgacggtatttcttgcggaaggcttgcactagaccgggcgggaattaaagtaacccgttacgttgcttccgaaatagataaatacgcaattggcgtaagtatggcaaattggaaagacatagagcgcaggggcgccgttcaagatttgaattttgaagaaaacgaattcgatttgttaataggcgggtcgccatgccaaggtttaagccgcgccaataacgaacgcttgaatttgcaagacgaacgttccgcattgttttacgaatatataagaatcaaaaataaggtaaagccgaaatattttcttcttgaaaacgttgtttgcgataaacaaaccgaagaaattatttccgaagaaatgggcgtaagacctgtacttataaacagttctttagtttcagcacaaaatagggaacgtctttattggactaacatacctttcgaaatgccggaagataaaggcatcgttttgcaagacattttggacaaaggacggcaggcaaaaggaagaaataaaagttattgcatcgtttcgactttttataaagaaaatataaaaagcattttgcaaagaaacaaacacggcctttattgttttgatgaaaatgataaaccttcaaaactaaacgtagaagaatgcgaacgtttgcaaactttaccaacaggttacacaaaatctgttagtcaaatgcggcgttatgctgcaattggtaacggatggacggtagatgttataacgcatattctgaaaggaattgaaaaatgaaccaaataaacgaacccgcaaagaccttcgactatatcgaagaagcgcacgtaaccgcgtcggataagtattacggcgaccgcgtgccgctggcctacttccgcgaaaccatcgccgaagccgtcgaagcccttaacaagcttgacgcaatcaagaaaaccatgttctacggtcgcgacgctggcgttccggcaccggaagccaacgcggcaacgctggcgaagcttcccgaatggatttccgaccatcccgaccgcgacgccgcagccgtgaacgtaattcatgcaatcatcggcaaggcgaccgaagcgggcgaactgttggaagccctaagcgccgcagccgaaggcgaagctttcgacgctgttaacgcgcttgaagaagtcggcgacggcttttggtacgatgcgcttttgctgcgcgccattggttcgaacttcggcgaagcgcagtcggtcaacatcgcgaagcttcgtcgtcgcttcccgaacgcttttaccgaattcgacgccaacaatcgcgacttgttcgaagaacgaaaaattcttgaacaaggggcttgacagcaacgaagggccgtcgtatagttcgtacataccggcgcaattgtgcggcggcccaaccgaaggagtaacaacaatgtctttcaacgaaaacgctaaccgcgacgctttgatcctgcaatggcaggaagcaacgaaggcgcttgccgcagcgaaagaagccgaatccgcattgcgcaccgaagttctgaaaaacgctttcgctttcgaccccgaagctttgcgcgaaggaaccgaaaacgtcgaa

SEQ ID NO: 28 - DNA, 43258 bp, Septimatrevirus EPa41
  source 1..43258: mol_type = genomic DNA; note = EPa41
agcttcaacgcctttacgtgcgcccggttccaaaggtgccgccgaacttcgcggtcgcttgtgttaatgttcgcgtcgcaatgcgcgtcgaattgttggaacagttcgcgggcggttgcgtcggtttgaacgtgaatcgccttatgctggctgttcagcattagcgcatgggcgcacaaggtcgaaagcctgtcgataagttcgaacgaaggttgggccgacaggtgccccggattcaacgccgggcgttcgccgtggtattcaatcatcgtaaaacgcggcaacagaccttcggaaatcaaaccttcgtgtaagccttcgtaaaacttttcgggcgtcgattcgccaagcaaggtaaaagacggggccaacactgcggcggtgttcttgtccttgtctgaataaatcgaaggtcgaagtaccttgccttcgcccgacttgttgtaagcatccaacaggaagcgacgaagcccggtaaggtgcggcggtgcgttgacgcttgccatttgttgaaggtaaataccaaattcgccgaccaacgaaacgaacgacgttggcccgcgcgacatatacttaataatcgcttgcgacgaagcaatttcgccggggccgataaagtccgacgcggcgggaacggttcggataacctgcgccattagcttatcaatgccgcttgcgatggcttctttacctgttccggtcggtgccaacaacagaacgtattgattaaggccagtgccggaaatgttgtacgccctgcccacaataccggcgaccaaaccaagggcaccggccaacgcgatttcgggcaccgggcgcggcgcttgtgcgtaaatgtattgcgcgatttctccgactaatccgggcggcacgctatatacctttgaagcttcgttaaggttcggggccggggcttgcggatgcggcgtcgcttcgctgttctgcgacaacgcggcggccctgtcggcggcttctttctttgctattgcttcgtctaacttgttgcgcaatccgtcaacgtcaacgggcggcaacatgcggtcgaaacacttgttcagcatgtacgaaacgtaatcgtcgcgttttgctttgtcacgctgccccaagcccgacgcacgaaacattcgcgaaatctgcgcccggttctgcgtataaaacgcgataatatcgaccaaggcaaagtcggcttcggattgcgaagcgtacatgccttcccatttgcccgcgtacagttcggcgaacttgtcgccattggctgcggcgactgcgcggttataaacctgttcgtcggtttccttggcttcggcaagcccggcgtaatgcgcgacggcaaccgaaccttgccccatctggccccaaagaacgttcaatagttcgttacaatcgttaatcggcgcgttgcggtaaacatcgccggtcatggtcatataacgaagcgaagaataaacttcgataaacgaacgacggcggcccgacggaatcgcgcccttgacgatgatatgcaaccccgaaccggaaggcgaccgttcggcgtagctgttgaattcgttaaaaatctttatttgacggtcaagcgccgtttggtcgcctttcgtgtcgtcaaggtcgataaaagaatacgggtcgttttcagtcaatacgaagccgattccagcataccaaccggacgacatagcattaacgcattcgtcgaacccggcccaagtgttcgggtcggttacgctggcaaggtgcccggtttttgctgaatacggaaccttcgtcggtttctttgaatccgtgtcttcgtatcgccacattacccattgcgggtaaatccgcatttcgtgcggaatattgttaaagtccattcttcgccaaccctttgtcaatcttgttataagtcgtcgccgttatgttcggcgcagaattggcaagcaaaagctttcttataagttcgtgcgaaacgttgcattgcgcggccagtgcccgcagcgaccgcccgacgcttgctttctttacccgcttcctaagttcttcaatgttcataacgccaccttctagcaattgtgggcagcctacccgccttcttgcttgctgtcaattgttgttgacaggaaaggcgcggtcggttacagtgctggaacgctgcggcatagggcagcagcatgaccaaaggggcttcaaagatgcgagttttgagtttatttgacggtatttcttgcggaaggcttgcactagaccgggcgggaattaaagtaacccgttacgttgcttccgaaatagataaatacgcaattggcgtaagtatggcaaattggaaagacatagagcgcaggggcgccgttcaagatttgaattttgaagaaaacgaattcgatttgttaataggcgggtcgccatgccaaggtttaagccgcgccaataacgaacgcttgaatttgcaagacgaacgttccgcattgttttacgaatatataagaatcaaaaataaggtaaagccgaaatattttcttcttgaaaacgttgtttgcgataaacaaaccgaagaaattatttccgaagaaatgggcgtaagacctgtacttataaacagttctttagtttcagcacaaaatagggaacgtctttattggactaacatacctttcgaaatgccggaagataaaggcatcgttttgcaagacattttggacaaaggacggcaggcaaaaggaagaaataaaagttattgcatcgtttcgactttttataaagaaaatataaaaagcattttgcaaagaaacaaacacggcctttattgttttgatgaaaatgataaaccttcaaaactaaacgtagaagaatgcgaacgtttgcaaactttaccaacaggttacacaaaatctgttagtcaaatgcggcgttatgctgcaattggtaacggatggacggtagatgttataacgcatattctgaaaggaattgaaaaatgaaccaaataaacgaacccgcaaagaccttcgactatatcgaagaagcgcacgtaaccgcgtcggataagtattacggcgaccgcgtgccgctggcctacttccgcgaaaccatcgccgaagccgtcgaagcccttaacaagcttgacgcaatcaagaaaaccatgttctacggtcgcgacgctggcgttccggcaccggaagccaacgcggcaacgctggcgaagcttcccgaatggatttccgaccatcccgaccgcgacgccgcagccgtgaacgtaattcatgcaatcatcggcaaggcgaccgaagcgggcgaactgttggaagccctaagcgccgcagccgaaggcgaagctttcgacgctgttaacgcgcttgaagaagtcggcgacggcttttggtacgatgcgcttttgctgcgcgccattggttcgaacttcggcgaagcgcagtcggtcaacatcgcgaagcttcgtcgtcgcttcccgaacgcttttaccgaattcgacgccaacaatcgcgacttgttcgaagaacgaaaaattcttgaacaaggggcttgacagcaacgaagggccgtcgtatagttcgtacataccggcgcaattgtgcggcggcccaaccgaaggagtaacaacaatgtctttcaacgaaaacgctaaccgcgacgctttgatcctgcaatggtaggaagcaacgaaggcgcttgccgcagcgaaagaagccgaatccgcattgcgcaccgaagttctgaaaaacgctttcgctttcgaccccgaagctttgcgcgaaggaaccgaaaacgtcgaacttggcgcaggctacaaactgaaagccgttttcaagattaaccgcagcttcgcaggcggccaagaagccgtcgaaaaggctttgcagaaaatcgaaaagaccggccccgaaggcgaatttatcgccgaacgtttggtaaaatggaagcccgaactttccgttaccgaatacaagaaccttcccgacaagttccgtaagcttatcgacgaagttgtaacgtcgaaggaagcaacgcccgcgcttgaacttgtcgcgccgaagtcgaagtaacaaccccgccccggttgcccacaagcgccggggccattcccgaaggtgcaagttatgcaaatgtcgcaattaaaaccggcgtcgcaactggcccgccgctacggcgtaaagtccgtcgtattcggtgcgcccggttccggcaaaacgccgcttatcaatactgcgccgcgtccggttttgcttgtgaccgaacccggtatgctgtccatgcgcggttcgaacgttcccgcatgggaagcgtattcgcccgcgcttatcgtcgaattcttcgaatggtttatgaaatcgcgcgaagctgcgaatttcgatacgttgggtattgacagtatttcgaacatcgccgaaattatcttggccgacgaattgggcaaggtcaaacacggtatgaaggcttacggcaatatgtccgaacgtgtaatgaaaatcgcgaacgacttgtattacatgccgcaaaagcatatcgtaatgattgcgaaacaagcccttgtcgaaaacggacggcaaacgattttgcagaacggcgaagttacttacgaaccgattatgcaaaaacgcccgttctttccgggcaaagaccttaacgttaaagttccgcatttgttcgataacgttatgcacttgggcgaagcaagcgtacccggaatgccgaagccggttcgggcgctgcgaacgaaggaaattcccgaagttttcgcgcgcgaccgtttgggcaatcttaacgaacttgaacagcccgaccttaccgcattgttcgcgaaagcgatgcaataaaacggtttacttcgccgccgtaaccaatggcgaagacttttcgaaaaggtgaaacatcatgcaacttattcaagcgttcaacgcacaacagtacgacccgacccaaggcgtcggaagcctgccgattggtaagcatccggtaatcgtcgaatcttccgaagtcaaggccaacaaagcgaacgacggcggttatctgcaactgaacttgcggattatcgacggcccgcagcagggcacgaccggcgcttatcgcctgaacctgtaccattccaaccaacagaccgtcgaaatcgcgcatcgccagctttcggcaatctgccacgtaatcggcgtgttccaagttaccgattcgtcgcagcttcacaacctgccgtttcttatcgaagtcgggccgcagaaaaacgacccgcagtacaccgaagttaaaaaggtgttcgatatgaacggcaacgaaccgggcaaggctggcgcaggcgcaccggcagcgcagccgcagcaacagcagccgcagggccagccgaacggcgcttggggcggtgccccgcagggccagccgcagcagcccgcaggcggtgccgcttggggcggacagcagcagcccgcgcagcaaccggcccaacagccgcagggcgcagcatggggcggccaaccggcgcagaacccggccccgcagggcggccaaccggcatggggcggccagcctgcccaacagcccgcgcagcagcaaccgcagggcggcggctggcaacagggcggccagcccgcgcagggcggcgcaccggcaggcgcggcaccttggggccagcgttaaggcgtaacgccgtcgcggcgtagattcgccggggtcttaaccggccccggcgtttctttttaaggagtatgcgaacttatgtcgaaaataaaagacgcattgccgacgcccgaacaatgcgatacttgttgttcgttcaacattgaactaacaacgaacgataagatttacgggcgaacttatggcaattggccgcatatttattattgcaatgattgtcgcgccgccgttggttgccatccgggcacgtttattccgttgggtcgtatggccgacagaacaacgcgccagcttcgaacgaaagcccataacgaattcgaccgcctttggcaaaccggcttaatgtcgcgcgcgaaggcttacaattggcttgcgaaccaattaggaatcgacccgtcggaatgccatatatcttggctgtcgaaagaccaacttaaagacgttgcgacactttcggcggattatttatcgaacaattacgaagcccttatgcggcgcaaggtgaagaacgatgcaaaacagcaaagacgcgaagaacgcacaattaacgctgaacgacgcgcagccgacgaaatccgacgcaggaaggcaaagcgtagaccttgacgcgcccggcgttgcaaccgcccttgcaaagcgcattaaagaagatatagacgaatattgcgttcgcacgtatgacggcgggcaccgtcggcaccttggcgcgtcgttgattggcgacgaatgcaagcggaagctttggtatatcttccgttggtgttttcgggaaaaaacggacgggcgcaagcaacgcttgtttaatcgtgggcatcgcgaagaagcgcgctttatcgaatggctggaaggcatcggcgttcaatgttggtacgaaaaccgcgacggcttcttttaccaagccgaaagcgacagttacggcgtattgaaggaaggcgaagaactgccgttgggctgcgaccttattacgaatgaaaatccgtattacgcccaacacgtcgcacgcgcgaaagccgacggcttggaattcccacaataccgcatttccggcgttatggggcacttcggcgggtcgcttgacggtatcgcccggcttcccgaacgctacggtatcgacgaacccgttttgctggaattcaagaccaacggaacaggcaagggcttttcggacttaatgtcgcaaggaatggcagtaagtaagccgcaacatttcgcccaaacttcgacgtatggcaacgaatatcgttttcgttatgttctttacctgaacattaacaagaacgacgacgacttgcattgcgaagttgtaaagctagaccatcggctaggccagcaaatgaaggaaaaggccgaacaaatcattctgtcgcaggaagcgccgccgcgcttgtcggataatccgacgtttcataagtgcggatattgcgcggcgaaggatatttgccacaagggcgcgattcctgaaaagaactgccgaagctgcaaggccgcaaatcctgtcgaaaacggcgaatggttttgcgaagttcacaacggcgtaattccgggcgatttcatcgctacgggttgcgattcttattcgccaattacagcggttgcaaagaatgtctaatatttatgttccgcgttggtatcaagacgaagcggaatattcaatattcgattatttccagcgcggcggggtcggaaaccccgtcgtcgctatgccgacgggaaccggaaagtcggtcgtaattgcaaactttattcgtcgaattttcggttactggccgaatcagcgaataatgatgcttacgcatgttaaagaactaatcgaacagaacgccgaaaagcttatgtcgatttggccgaccgcgccaatgggcatttattcggcgggtttgaattcccgcgatatgattatgccaatcgtattcggcggcgttcagtccgtagcgcctgcgattaaacgcgggcttgaagaagacgacggacgcccggcgcatcttcgccatttcggttggcgcgacttgctgttaatcgacgaatgccatttgttaagcgacaaggaagattcgcattaccaatacattatcgccgaacttcgcaagattaacccgcatcttaaagttatcggatttacggcaacgccctatcgaatgaaaatggggcttattaccgacaacggaatttttaccgacatttgttacgatataaccggcgttgaatcgtttaaccgacttatcgccgaaggctacttgtcgccgcttatcgcaaggccgacgcgaaccgaaatcgacttgtcgaaagtaggcgtaacggctggcgaattcaacagcaagcaactagaagccgccgtagataccgacgaagttgtttttaacgctgttcgggaaatgaccgaaatagcttacgaccgttcgacttggcttatcttcgcaactggcattgataataccgaacacgtcgcgaacgtaattcagtcttacggcttggaagttttgccggttcattccaagttgccttcgaagacgaataccgaacgtttgcgcgctttcaaagctggcgaacttcgcggcttggtatcggggcagaaacttacaacgggtttcgaccatccgccgattgactttatcggcgatttgaacccgacgctatcgccgggcaaacacgttcaaaagttgggacgcggaacccgaccgtcgccggatactggcaaacaaaattgcctgtacgcggactttgccggaaacgttcgaagacttggcccaatcaacgacccgcgaattccgaacagaccgggcaaaggcggcggcgacgcgcccgttcgtatttgcgacgtatgcggcgtatataatcacgctgcggcccggcagtgtattaactgcggcaccgaatttacttttgaaacgaagttgtttgcgactgccggaacgctggaaccgctgcgaagcgacgcgccgatagtcgaatacttcgacgttcaaaaggtactttacaacttgcacgaaaagcgcgacgcaaacggaaatctaacgaaaccgccgatgattaaggttagttacttttgcggcttccaaatgttcaacgaatttataatgcttgaacatccggggcttgcggcgaaacgttcgcgcgattggtggcggcagcggcacgccgaagaaccgccgccgacgacttatcaagctttgcagcgtgtttcagaacttcgcacgccgcgccgtgttcgcgtatgggtgaacaaaaagtatcccgaagttctttccgctgaatggtgaacaaatggccgaaatatcgcccgataaaaacgtagaaaagaaccgcgaattactgttgcaacgttcaatcgttggacttgcaaagtacggcgtaacgacggataataacccgttgtcgcttcgcgattggttgcaacacgcgctagaagaaacgctagacttggcgaactatcttcaagcggcaatttcgaaacttgacgaagaaggggccgaaaatgaaaatcgacagtaatattccgcttccgcccgaagacgaagcgccagccgccgaacagccgaagaaaaagccaagggcgcgcaggcaagccgcagccggaaagaaaaaggccaaggggccaagccctgcggcgtcgcttttggcggcgttgaagttcgttgccatcgcgcagaaaaaggccgggccgacgaacgttcagttcgggcacattgcccacaattgggcggcggcttccgacggggttttgaccgtcgcgcatcctatcgaagaagacttggtagcgtgcccgcatacgttgcagtttatcgacgcgctgtcgaaggtcggcgaagaactgtcgattacgcagcttaccgcgaacgcccttgccgtatcgtctggcgcgttccgggcgttggtgccttgtgtgggcttcgacgacgtgccgattaccgcgcccgacccgcaatgcgccacaatcgacgaccggattaaaacggccttcgctgcggtcgcagggcttgcgacagacggcgcaccgaatgcgacctatgccgccgtcttgctgcaagccggaagcgccgtcgcgaccaacggggcggccttgctggaagcgtggcacggtatcgaccttccgcccggcatgatgcttccgaagtgcgcggcggtcgctgtcgccaaggctggcccggcccttaccggcttcggcttttcggcgtcgtcggcaacgttctatttcgaaaacggggcgtttatcaaaacgcaactttacggcgaacgttacccgaattaccaagtcgtcttcgaagttgaaggcttgaacccttggccggttcccgacgatttttacaacggcgttcgcgcgattcagtcgtttagcccgaacggaaacgtattcttcgacgacggggcggttttgtcgaagatgcacaaagaagaagcttcgacgtacaaaatcgaaggcttgccggaacgaatgggcttttctgcgaagttgcttctttccgtcgaacatgcgtttaagaaagcgcatttcgcaccggaagcaaacaaggtcgtatttttcggcgacaatttgcgcggcgttcttatgggtcttgaccttggcagcgaagcgacgcataatccgtcggacaattacgaagacgacataccgttttaaggggctttcgcatgattaacgaacaaggctttattgttgcaaagaaaagccgcgtcgtcgataagctggccgcaagcattcggcaggctttgcggcctgtcgaatttatgtcggacgaagaactaacggcaatgcctgccggaagtgtcttcgtcttcgacgttgaaacttacgtaaatttcttttacgtagcgtttaagtcgcttgataacggaaagttcgtcgcgtttgaacgcagccccgaccatgattttaacccgacgaagcttctttggatgctttggcggttctgtatcgtcggcttcaattcgcgcaattatgacttgccgatgattgaactagccgcacgcggggcaagctgcgcgaagcttaaagaagcgtccgatttcatcattaaaagcgggccgaactatggaaccgaaaaggtaacgccgttcgcgttcgaaaagaagtacggcgtacaaattggccgatacaatcatatcgatcttatcgaagttgcgccgcttcaaggttcgttgaagctgtacgcggggcgcttgcattgcgaacgtatgcaagacttgccgtttcccgaagaccatgtattgacgcaggaagacgccgaaatagtgcggccttattgctgcaacgacctttcaaataccgaacttttgtttaacgaacttgcgcccgaattgaaattgcgggccgaaatgtcggaagaatacggcgtagaccttcggtcgaaatcagacgcacaagtagccgaagcggttattaactccgaacttcaaaaagtccttggctattatccgaagaagcccacattatccgccgatacggtcttggtttacgacgtgcccgacttcgtttgctatcaaacgacgcagcttcgcgaaatgctggaagtcgtgcgaaacgcccgcttctatcttgacggcttgggttcgccaatcatgccgcccgaactggaaaagctgaaagtaaccatcggcggttcgacgtacaaactaggcatgggcggtttgcattctaccgaaaagaaaacggcgcactatgcgaccgacgaaatcattttggcagacaacgacgtagaatcgttttacccgcgaacaatccttaatcaaagactttgcccgccgcacttgggcgaagctttcttgaccgtttacgaaaaaatcgtaaatacgcgaattcatgccaaagccgaagcggctaaggcaaagaaagcgggcgaccgcgcagccgcgaagaaatggaagaccgttgccgacagcttgaagattaccattaacggaagcttcggcaagcttggcaacaagtattcgacgctttacgcgccgcaacttatgttgcaagtaacgattaccgggcaacttgtgttgcttatgcttatcgaagctttggaacaaatcggcattgaagttatttccggcaataccgacggcattatttcgaagtatcacaaatcgcggcacgacgaagtaagggcgcttattgcggcttgggaagaatggacaggatacaagaccgaagaaacgcggtataaagccgtattcagccgcgacgttaatagttatgtcgcaatcaaggaagacggcggcgaccccgaagcgcgctttcttgacgaacaattaggcgcaaaaactaagggcgcttattgcgaacgcgggtcggccttgaattcgattctttcgaagaaccccgaaaccctgatttgttccgacgccgttgttcgcttccttgttgacggaacgccggtcgaaaagacgattaaagaatgccgcgacttccggcgcttcgttgcagtaaagaacgtgcgcggcggcggcgaaaagaacggtcgttatcttggcaaggttgttcgttggtattacccgaagaacgaagccgggtatattgcttacgtatccagcggaaacaaagtcgggaaaaccgacggcgcacgccctgtaatggacttgccgacggaatttcccgacgatataaattacgattggtatattaacgaagcggtcgaaatgctgtacgactgcgggcggttgaagaaggccaaaaccgccgcgctgtcgttcttttgattacggcggcggcggtgccgttagggtcattgtaagcgaatcgctgtacgtcgaatatttcgaattcgccgtaataaacgaatctacaataacttctagcgtgccgtacttgcccgttacgtcaagggtcgtcgaacttcccgaagtcgtaacggtcgtgtaagcgccgccgcctacacgccagcgaacgcgggtttcggtgccagcttcccgcgtgttcgccgtgtcgccataaacgcgcaacagggtatcggcccggctgcggttgcgccatgcaacagcaatcgacgttgcgcctacttgtgggcttggcgtgcggcttcctgcaagcgttaggtactgcggcggcagcggcaacccggcccggttggtaagcgacccgctgaacgacggggccaacgaaatatcaagcttgctgcccgaagtcgtatccaaaagcttaacgtatcgcgtcgttccgaccgaaacaagttccggcaacagtccgtcggttccgctaatgaaccaaacgcggtcgttcgccgcatgattgcccggcacggtatccagaacgccgcgatacacgttcgggaaggtaatttgaccgccgccattgtcaacgaagcccacataaacgaacagttcgttattaatcagcaggaaggccgaaccgtcgcgcgcttggtctagcgtcgtgtattgctgcaaaccttcgatgcttgcttgcgacacgccagttacgacaaggcttccgcttgtatcgttgcgggtttcgctggcgactgtcgaagcgtaggcgttcagcaacacgccgccgccgttgtacggggcgctttcaagcgacagaataggcgacgaactgaaattgtccggggccgtcattgcgtcgtaagaaatggacgtagaacccggcgcaactgcggcaaggtacagacgcccggcagaatcgaacgaagccggggtttcgctgtcgtcgtatccggtaaggaacgcaggcggcgtaaaaagaaggcgcgttgtaaccggcgtcgggtttgtgttaatcggcgtccagccagaaccttcgggcggtgcgaacgtaagcgaagacgacgaaaagcggtcttgtacgcaagaaagctttatttggttggacgtaagttcgccgaaatcaattttcgtaacgcgcataaccatattcgaaatgccgaacggcgaccaattcagaacgaacacgcttccgggccgcaagttctgcgccttgcggttaacggtcaagtcgcacttgtaaagcggaacgttcaaaattgaaagttggcgcgccgcaatcttgcttgctaccgttgcgtcggtaacgccgggcgtcgaaacttccgtagacttaacgcggttttgaaagttgatatttgcgaagtcttgggtaattgctacgctgtcgtcgtaactactggcgcggttcttgaacgtaacccggcattggttaaaagtgttttcccatgttgttttctggaagttgcgaagttccttaaccgaagattcgtcaagaacaagaagttcggaaaccgtgtaatcttggcgaacaagtttcgcaacaatcttcgccgttgccgggtcttgatacaacacgccgtcggcgacgcgcattacttcttccaacaagtcctttccggtaatcgcagattgaacaataagcgacatacccaagccttcgttatacagcgtttgcgcgcaggccgtgaacgaaggcatatcaatttcgctttcaaggttgccgaagcggccccatttctgcgtcattgcgtcgtaaacaatttccatcgggttaacgtccaacccgtttggcatgattgaataagtcgcgtgcaagccggacgtaatgcgctgaatttcgaagctgaaaggttccggcgtcgtacctgttccgatataaaaggctttgaacagcgcacgcgcaaagccgttgtacgccggaacattcgggccaatcttcgaaaccaagtaagaatcttgcggcgggtcaaaacgaccgtcataaaacgaaatcgtaccttgcaggccgccgcgttcgtcttcgccgccaaacaagttcggcttgttaatgtaaatatcgccggacgaagttaagttgccttcccaaacaaggtaagtaccggcccaaaacttacgaagtcgaacgccggggccaaggcacaaaatacaatcaatgccaagataatttttataaccgaccgtaactttcttcgaactaaaaagcccggtcttcattttcttacgaattggcaccgggcggaagtcgccaaaccaagccgttatcggcgatttctggcgcactgttccccacactagcggcattgggtcgccgtacttggaacgcggaaattggaagtcgccaagtttcgccgcgcgtgcgttttcgacgttcggtttcggcataagcgccgccataagcaagaaggcgacgacgaagacaattgcaatccacatttgttaatgaaccccgctttgaaatacgttattcgattcgcccggaacaaacgggcaaccgccgaagttcggttgattattgaacttggggcaaccgttggccccgttgtaagaatggtcgcaacctgccgtaacctgaatcgaagtgccgacagaaatacgcgcaaattcgtaatttaccgttagaattgccccggcttgcgcgacaatcattcgacgttcgttgcgcgcaggtattgctatttcgccgccgataaaccaaccgtcgggaaaaccgccaagcgacggaatcgaaatgttgcgaccttcgaccgccgaaacctgcgtatctagcgaattgcttacgcggcttaccttgcaacgttcgtcgaacagaacgttattgcaaggcggctgtacgtaaacgttcggtatattacccgacagcatcgaaccgaacttgcttggcgttctgaacgttacaaattcgtcgtcaaccgaaattgaagcaatcggccctttccagtatgcgacccaagttgcggcgtcgcgctggcgacggtaaatcgtcaaaaccaaagacggcggcgtagtttgaaacgcatagtctttaacgatttgttccgtaatcggaagcgtaaccgtcatatctacgttgtcgtcttcgtgcgttccgactttcagcgtactgcgcttcaaacccggaacggggttatatgtcgcactgttgaagacgtgcgacagggcgtcggaagtcatgtaataattgcgatacgaaccgacgaattcgtaaagttcaaatggcgcgctatcgcctacgctttcttctttgtcgtcgtaatcagacattagggttccgccgttcgaattgaaagattcaagattgattcaagaccgtaatgcttccattctactttatcgtcgccaaggcgtacaggcaacaagtacgaaattcgcttaacttccatccatccggccccggtcggaagcggcggattaaaaacaattatagaaacgtcttcttcccctttcgacgcgcctgttatttcagttctatgaatgccggatgctgtttctatttcaagatagcgatgcgttataatttgccaaattttttcggcgtactccgacccttctacggtataaacggaagccccgtcggacggttgcacggccaaggccaaatcggttcgatatgtgggcatccaaaacttgcgcgcctgtccgcgtgcatacgcaagaattgctttccaataatccaattcttcgggattcgaaatacgatttactttgaagcttcgcggcccgccgatgcggctataatcccaacgcgaaataatgtcggcaagtccggtttgattgtcgattgaaatttggccggttgaaacttcgtcgcgtacaaggtcgttcgcaagcgggcgcttcgtcaaaaccggcacgccgccgaactgttcaagtacgacggttgcgccgggtcgggtaagttgcgaacgctggcgaatcatcttcgcgttaatttctacttcgccgacggtatcgacggaataccgcgcaagtgctgtattgtcgtcaataagcgcaggtgaacccggaatgattaacgaccctgcgggaatgtcgaacagcaatggcgaaccaagcgtagccccgtcggctgtcaatacgtcaatttcaacaagcgcagcgacaagcggcgtttgaaccaaaacgtattcgctatcgcgaacgtcggtcttcgtccggtcgaaataaatttgaagcgcgccgctattgcttgcggcagtaattcgggttgcgtactgaaattcgggaatccaaagccgaccgactgccgacataacgtcgccgtaaaaacggcgcagggcttcgacagaatcaaaaattactttcaagcgttcttcaatacgcggaacttcgccgcgaagtgctatgcgctgttctgttccgtcaattgctacaatattgtcgcttaaccattcccaagtttcgttcaacggaacttcgggcacaatgtcgaattttacagcacgaacgccagtaatcaaaatcggcaaagggtcgccgacatttgaaaaatcaaattgcacttcaacattgatattcggcggccctgaaacgcctacggttatttcgtaagtaagttcttgaagcggcggcattgcatacggcgtagcttggccggtaatttcaatgccgaccggattacttaccaaaatatcgtcaagattcgccgcacggtcgggccatgcgttccaaacgttgaattcgcgcgtttgtgaagacgcaacggtttgtaaatccaaaagcaacggcgaaacgtgaacgcgaaaataaaaatcgcgaagaaagttcgcccgttccttacccacaatgggccagcggtttgcagcatggacgcgccaaaccgcataagggccgaaaatgcgacgcccgattacgtcaatgccgaccggcaaatattcaacttccgaatatttgtcaagttcggaagaataatcggggttgtcttcgccatatataaactgttgcgtaaatacgccaattcttccggccattctttagcttccagtgtattttatagcgtatccgtaagttccgctatgtatagaatttgaagaaccttgcctttgcgcaaggttctttctataaaatgggtaaattttccattggtcggccccgtaaacgacaagacttccgggttccaaattatcaattcgacaataacgaacgcttggcgggtttacgactatggtaaggccgccgctacttcttgacttaatgcctttcactggaacaagtacggttgccgaattagattggttcggcaaactgtttattattcctgcgcaatgcgggtatcctaaattcgaaccccgcgtgttataccaatttacagcgtcaagcccgcaatgaaaataattgccagtatatccgctgccgcttccaagcgcgtcgaagaaaagtccgccagacattccccaaaaaccgcgcgttccgccaccatccatgtttgtgctggaattcatatcgaatgtgtttccgcttccgccttgcggtatgcgactatcgtaacttccggtaaaccatgcgccggttccgccgatgccggaaatcaacgacttcccgaacgacagttgttggtagaaatccgaattgtagtttatcacgcaataaacttcgtcttccggcgaagtcattacgtgaatttcataattcatcggaaaagaaatcggcgttccagtcggcgacattacttttacgaagctagacgggccaccgttcaaggttgaaccagtttggccggttccgccttgcaacgtaagttgcggcgtagtggcgacaagttggaaaaaacaaccgttcttcgaaagaatgccgtcagaaaacgtccatccattagcgacgcaagcattttcgatagcggttttcaaatccgcgaaagtcgcggcacttccgttatagtaggccattatttcatttccaaagcgacaaaatcgcgccaagttgtacggttaacgttctggcacattacaaaagcgcgcccgccaactgctataatcgcgtctacggcttgaagtaccgtcattcccgtttggtctacgacagaacttccgcccatttgaaccacgttttcggggccattgttgaaaccggaacaaaaataaacgccgtccaattccccccaaacgttgcccattccggcgcttgtttgtaattgggaaaggattataggttcaagttggtaataatcgccagcgggaacaagcgtgttcgaaccctgcggccctgcaaggggcgaaccgcttgcggtatttgcgtttgtgtaaggatacgaccaaacttttgaccaaacgccggtttgataacgaacccacatataacaggccgtcgaataatattcgcccggatatgggaattgctggtttgcgtctgaaaaacgctttgcttcggccccgttgaacatgcttgcacaaacaagcggcgacggatattcgccgggccgcgcatagggaaagaacttgccgacgtaaaaatgttcataaaccggcgtaccaactttgaagcatccgacgattcgttgggcgttggccgttatgaaatacgtaattgcgttattgtgggcaggcgttgcgctaaactgcgcgccgggttgtgtttcgaaagtgtttccgcttacgtaaccgacgaaagttccgcaattgatattgtaataatcgccgccgacgctttgataacacttaaaccctacaaagatttcttcaagaccggacaagccaacgcctttcaaaatcaattcgcggtcaagtccggttgatacgtaacgaagcgtcgtccatccgttcgcttcggccagcgttttgataattgccaaaacttgataatggcaatcgtcgccgccgccttttgtaactgttccaattgcataacccatttatttaactccgacgatttttgcgacggtgccgccgttttgttcgatagtttccagaatgaaagcccggccttccgaagatttaagcccggccaaggccgcttctttcgattgtacgacaacggcgctaaaaggtacattgacaaccggcgcgggcgcgggttcggaattgccgcccctgcccacactagccgccattgcctgttcgtcgttgcgctgaacactggccgcgcccgtttgcagggcttgaaggtctgcaacgccaatgcggttggtcgccgatgcgttcataacgaattcttggccgtgtacgacgcccgcgacttcgtttacgcccattgacccggtaaagccgcccgacttaaacccggtattctgcgaccggatttgctgaacgttcgccaagcctgcggcaattgcagccgcagccgcagccgcgcccaacgccgggccgacgtaaggaatcgacgccatcgcagcataagccgacgttgccgattgatacgtattaatcatcgcttgcgcgattgctgcggccttcccgaccgccgccattttcttatttcccgactgttgaagcgcggccaagtttccgaagaaactacttgccgaattcaagtacaggttttgccgctgcaattcaagttgcatacttgcggcggcgtattcttggtcgctaatcaaacgctgttcgttcagcattttaagctgttcgacgtaagtttgatattgcgccaattgcgcgttaagctgcgtttgaaagttcgtcgtatcaatgcccatgccttgcaacatgctgttagttgcttcggcttggtcgcctgcgttgaaaccgcttccgctgttgttgcgcaagttctgaattgctttcagttggtcgataaactgttggcgcttgtttacgctggcgtccaacaacgacgcttcttgctgcgaaacggcgtttacttgctgaataagcaacagcttttcgcgaagctgcgccaattcggtttcgtttagaacgatgccttttgcaagcaaatcgttctgaacttgcataatctgctgttcgatttcgcgttgcttcggcagcatttgcaaaagctgcaattgctgttcaaggtcgcggttatactgccgcaacgggtcttgcgaatttgcgtaagcttccgacgccttcgttactgcgcgggcgtgctgttcctgcgtaattgcgcccatttgaagaagcttgttcgccgcttcctgcgccgcgttgtattccttcaacgggttaacagcttcggcgtaaattgcgtcgaactggcgttgaacttcggtcgcgtcttgaacggccttaatcttcgccttgattgcttcggcttcttccgacgtaagcttaatctttttctgaatcaagctttcttcgatttggtcgaacttcgcttgcgcttcgcgctgcggttgaagctggaacatacgcgccaattcgttgtcaagctgcgtattgattttttccattgcaagcgcgcgacgttccgcagccttggccgcgtttgcgtcggtagccccggcaagctgcgacgtaccggccccgcgaagctgcgcgcttcctgcggcccggcgctgcgccccgatttgctgcgaacggtcgaaaaggccgttcaacaggttttgcattgcgccgccttggctgttaaatccgtcttccagcgattgcgcccaaagcttgccccaagattcgaattcggtttggcctgcgctgcccatacgttcgaattggacaagttcgtaagccgacttaccgaccatcgcgcgaagcctgttcgcggcttcaatggctttattcgttacgttttcaatccaacccgcgacaacgttgtaagcgttcgcaattccgttttgaaccgaaataacaacttcggccattgcacggcctgcgaacgttgcggccccggtcaaaagcccggcgattgcgtcaagaacttttgcggcgttttccagcgcaccggcccaacctgtacggttggtttgaaagaatgcggcgtaactgtccgaccaagaagaagtcgaatcgtcaacgttcgaagtaatttcgccaagggctgcgcttgcgaagtcgctaagttctgcccacaattgcgacgcgatggttttaacgtcgtcgattgcttggccgatgccttcaaaggtcgcgcggaagaaatcgcccaacgtcgtaacgtcgtcgattcccaagttaatttcgtcgcggaaaagcgttagatacgcaattgcagtcgaaagcgcgacgacgataaggccaatcgggttcgaagcaagcgccagcgtaaaggcttttaccgcagccgtcgcaccggccagcgcaccggccaacggggcaccgaaggcgacaagcaatgcgacgccaagcccggcgacgattacggcaaccgtcttcaagttttcgccaagccaaagaatcgcgcgcgaaagcccggcagtaaatccggtcgctttgttcaattcgccgaagaactgaattgcattgttgcgaagaaccgtcaagctttggccaattgtgggcgtcgtcttattaaacgttgcgtctacttggtcttgtataagcttgaaagcttcaaacaaaacttcggaagtaattttaccttcggtcgaaagttccttaacgcggttaattggaacgttaagcgccttcgctacggcgtccaaaacgattggcatattttccgaaacggcgcggaattcgtcgccttgcagcttaccggcgttgaagccctgcgaaagctgcaacaaagccgacgacgcttcttgcgctgttgcaccggaaacaatcaaagccttgttaatggtttcggtcattcgcaacgaatcttcttgcgacttacccataaacgccaaggcgcggtcgaagcgtgtaaacgctgtcgccgtttcttcaatacccgcgcgcgtgcggttcgacagttcgaaaagttcgttcgtaagcgtgttaacttgttcttgcgacttcgttacgttctgcaacttgttttgaagcgtaacgtatgcgtcggcgcttgcaagaattgcgttcgccgaaatggttacgccaagaattccggcagcggttcgaatgtatccgccaagggccgaagtcgcgttgcgggtcgaatttgcggcccggtcttgcgcctgttgcagccgcagggcggcaagggcggcccggtcgttcgctgccgccgcgttggccgtctgaacggctgtccgctgctgttctgtcgctaggcgctgcgcggctgtcgccgtctgctgttgggccgtctgcgtgcgctgcgtggcgctggcaaggttggcttgcgcggttgccccttgggtcgcagccgtcgcgacgcgctgttgggctgcggcggcctgcgctgcggctgttgcggtgcgctgctgttcggttgccagccgttgcgcggcaagcgcgccttgttgaagctggcgcgttgcgctggccgatgcgttgataagctgcgacaagccgccgacgttgattgccgaaagctgcgtttgaaggttcttaactgcggcgtcggcgttgcgggcttcgcttgcaattgtgcgaagcttcgtcgaaatggacggcgaaactttgtcttgaaccttaatttctatgttttcgtcggccatttcttttaatccttaatcttgaacttcttacgcattttgcgaccaatcaaaacggcgcgttcgacgaaccccgccggggcttgtgccgaataaccgtcgttcagcctgcggatatacggaaggttgttcgtaataaatatcgcttggccgggcttcttgtttcgtaaaacaagcttcgcagaattcaacgtttcagccgccgaagcgcgttgcgttgaaccctgcgaacccggaaaatgcggcttgatttgttgacccgacggactttctagcgttacaatccagttcgacaaagcttgcgaagtatctacgggcgttttgtacgccaagtcgcccacaatagccaaagcggtatcgacggcgttttgtgacgccgcttcgtctattgccttcgctttcttttccagcctatcggctaggtctagcaggctttttgccattcgatgccgccgctttctgtttgtccgctagtttcttcaagtgttccgaatcaagctttcgcataaagtaaaacaagtcttcggtttgttcttcgtcaaactcgaaagcccttgcgtaagccgccatacttgtccaaggtatcggcgttaaaccgttgccgtgcgaccgttcgctatctaggtcgaagaaggcttgcaaatacaactgcaagcctacttcaagttctggcgcgttcgcgatgcgttcgggtaacggttgccccgcgcgcatcgcttgctttgctatcgcctgttcgtgtgggccaagttccaacaggtgcgccaaaacttcggttagttttttgcttcggcttccaaagcgctatcgcggaagttcgaagccaacttggcttcttcctgcaaacgttcgtaaacgtccggcagttcagtaagaagcgaaattgcggcgtccttcgaatacgcaatttccttgccgtcttcgccctgaacgttcttccagccgcgcaacacggtatcgacgaacacgcccataaacagcgattcggcgacttcgtttttcagcgtgccaagttcgacttgacggcgataaggacgggtcgccgcgtcaagtgcctttgaatacgccttgttcgatttgcccatgcgggaaataacgaaagtcggaacgctgccgtcgtcgttctgcgcttcgggaaattcgatttcgacgccttcgacttccttggtcgaattcgttttgaattgcttaaacagtccagacatttgatttactccgattgaatgaagaaagggccggtattacccggccctttgagtttaccgcaattagtccggcattgccagattcggcagataagaaaacacttcgtacagcatcgtatagccgttcgcgttttctgcgcctgcgggttccagcggaacggtaatcggcgcgtctttttcgacgttcagacgaccgccgcccaaaccaagcaacggaatatcgaacacgaaaccggcgttcttggccgcactgattaccgacaagccaacgtcggcgttcgcgcgaacagccttaaccgctgcgacggtcgtaaagtaagcggtaatcgaaccgccgacttcgaagttacccgccgaagtatcgaacgcgcccaacacgccgaccgccttgttcggcgtaatgttgttgttaatcgaaacgttcgcttcggaaacgtagccgaacaaggcggcggggttcgacgacgcggcgtcgtgaacggccatcttgattcggtaaacgtccgaagaagtgttgtaagcatcttcgccgggcgcaggcacgcgggttccggctttctgttcgtcgccggggtcgccgctgcgataagtgttatcgcacgcaacaaacgaaaggtcggcgttcagcttgtcggcctgcggaatgttcaacgtaaattcgttcggtactgcgccttccaagtattcacactgcgtaccgttcaaaccttcgcccaaggtgcgttcgatttgatacgaacgacgcttgataagtgccggggtcttttcgttcttgataacagttccgacgaaaagacgaaccgacttgccggttccggtttcgttgacggcctgccaagttacgtcgtcgaaaacaagcgccttcgctgtaaccgacttaatgcgggcatagcccacattattagcgaagcggtttgccgtcgcatcgccgccgacgaagacccaacgaccggggaacagttcgggcatggtcgtaaagtcgccagcggtaacgataagcgaaacgacgttgccagttacggcaatgttcgcgtctgcggcggcaagttggcgaccgacgcattccagcttcgcgcctgcgggcggggtttcgtcaatcagggtttcagcaacaacgacgcccgcagcggtagccgaaacgacggttttaaggccgttgttcgccgcgttggcaaagccggtcgcatataccagcatatcggcaccaaacacgccaagcccggaagctgcggcgtaagtgctgtcaactgcggtaacgccggtaagcgcaaccgatgcgccgttaagcggctgcgtcgaaggaagttcgcgcgcgtctgcaaagaagaaaccttgcagaattcgcgtaaggttggtcttcgtaaagtccgtgttgaatccgcccgatgcgtcaaggtcggtaatcgtgcctttcttgttctggcgcgacgggtcaataggggcgcgggcaacggtcgaaagttcgccgccgaagtccgaatagctgttgggttccagtccgtaccaaacgggcgtcgtcggaagttgcttcaagcattcttcttcggcgaaggcaagtccggtaatgttgctgtcgattttggcaatttcgcataccatgttaagaactccttaacctatttcgtcgtattcaaattcggtaacgacgttaaaccgttcgtaaagttcttcgggcggaagttcgttaattcgcgtattgcgaaaccaaaccttacccggcgtcgatttcccgcgaaaagcattacgggaaagtttcgccaatttctgcccaagttcgaacgcttgcgtattcgatttcgggcaaaagatttgtacgaagacaagacccgacgccgtgtattttctttgccccggtactccttcgcaggttgaaagggttgcttgttcttcaaaaacggtttgcttcgacagccgaacccaaaacttcgaaccgtccggcaagtcgcgatattgcacgccctgccaacgaatttcgggaatataacccgcaattgccgcgcttcctgcgttccaagctgcaagaaaaagcgcgtttacttcgtcgttaacttggtcgaattcaatcatgcttgaaataccatcgtgtaaagtaccttttgcccgttcggcgaaagtacgtcgatataagccaagcgaagttcgaccccgttacgaattacaacgtctttcaaattcggttcaaacggaacattgcccataagccccattacggaacccttcggaacttcggtgcctttaatgaagttgaaggtttcttgcgtctgccggtcaaccggcaaaaagcaaatggtaacgtctttgtcgtccggcaatgccgggccgggttcccaaggcttgttcgggtctgttggcgtcgcgtcttcgataacgcgccatttcaccttttcgccgttctttgcgataaggcgttgcgccgttttaattgctgcgtcgaaacgtgccattcgtcaaacccttattgtacgaagcgcaaacttgttcgaagcgcattcgccaaacagcggcgcaagaagcgcgttcgctgcggtaaatgtgggcatgatgccaaccgacaacgggtcggcgtattccgtttcaatcggcccgaccttttcgcgtgtaacgtagtcttgcggcgaaacgttcggttgaaggtcgaagcctgcgttaatcgccattgcaagctgaacttgcgcggcaataagcgacttcggaataacgttcgacggtacttcgtcttcgttcaggaaaacgccagttcgcggccattgtagcggctgcgtcgtcgaagtcggcttgccttggaaccggcaagcctgcgcttctaggtaatccgtcgaacgaatcagcatggccgccaattcgtcgtcgtccaacggaagttcaacgccgcgattcgaagcgtaaatgcgcgcgtctgcgacgcttacgtaactgttcgcgtttgttacgccgcttccgtcttcaacaacgattgtaattgccatgcgtcaacgtccttacgaaagaacgatgccggttacaacgccgttcgcaacgctaacggttgcggtcgtcgtgtaagtgccagtaaccggaacggtcaaggcttcggcgtcgttaacgattgcctgcgttgccgtaagcgcctgattcgggattgcgtcggggtcgataacgtcaacttcggaataaaccgaaggaacagtacccgcgacgtaatccgacggaatgattcggtcggtttcgccgtattcggcatttgctgcgccgttggctaccaaaacttcgtattgcggttcggcggctgcgttaagcttcgcaatgtcggcaagttcgccagccgttgcgttaatgcctgccgtgaaataaacaacctttttcgttgccattgcgaagactccttaattcgttgttgaaacggcctgcccacaataagcgacaggccgtccgttcgttactgcgccgggttggggttccaagccggggcgctgccgccctgcggggctttctggccctgcgccggggtctggccctgcgtagcggctgcgggcttgtcggcggccttgccgctggccttcggtgccggggcgtcgccgaccttcgaagcaagggctttcagttcggcggccttcttcttgattgcttcgcccgcttccgggtaagcgtcggcgtacagcttcggaaccttgcccgctacgccgtcgcagatttccagcgaatgcggttcggacggaacagcgcgggcgttcctgaacataacttgcgcgttcagttcggcggcggctgcgaagtcttccggggtcggtgcgttgccgtcaacgaagaacagaatttttgccggtttcatcttcgaaactcctttgaatttgtgaaggactagaagaacggggccgaagccccgtccgtctgccgtccgttagtgaacttcgacgacaacgcccgccaaatccttttcggaagttgcgtacttgtcccaattggtcgaagtgaacaacgccgcgtcggtcggcgacttgccgccgttcgccttgtcccaagcgaagcccttaacgccgacgttgtacgaccattcggcttggtaagtccgaataatgttttcgtcgccgttcttggtttcttcgttcgcgtcgaagtcgttgttttgaccaatcataaccgcgcccggcacaaggccaaggatgcgataaacgttcggcgtaccggcttcgaacaggttgggcgaatcggtcataacaagaagcttgccgaacgggtcgcgaacaacgttcacggtgccgtaagtaaacaggcgttcggagttgttcaggttgttaccgtacagcttgtgcatgggcgtactgtgcataatccatgccgcaatctgcgcggattggtcgccgaacttggcttggccgttgttaaggttgttccaagtcgggccgtcgtcgggcgcagtattgccggtcgcgtcgtaaacaacggcggaaacctgcgacagcgccgaatagaccgaaccaagaccgacgttcagcatatccgccatcgtatcgacggcgagttgctgccccattgccgcgcctgcgacttccgggttctgctgaatccaacggaattggccggggtcaaggcgaacaggcggcgtaccggctgcgaccttaaccgacgtatcgacaaggtgtttcaagaccttttcggcgacggtgccggaaccgtaggcgttacgacggcgaacaaggccgcccgttaccttggcgaaaaaagcaacgtcggaaaagtcgccttggtgcgctgcggattgcagcatgatagccccgcccgtcgcagcgttgaacaaatcaacctgttggcgcagggtttcggagaaagccgaataagcgtattcggagtaaacagcaaggtcggaaagtgccatgattaagcgtccttagtttcggttgccttcgcttctttaatgaaggccgcaagttctgcgggattcatcttcgaaaggtcggcgggtttgtcggattgaccgttaaatttcggggcaccgccgccgttctgcgaaggcttaccggcaccgccggacgccttactagccgtgataatagcagaaaaatccttgtttgcaacgaattcgtttgccagttcgtcgatagtaagggccgacggcttgccgtccttgtccagaacgcgcgtaaccggcgtgtcgccttcgaagtctgccataagccgcgacttgatatgcggcatgataagcgccggggcgttcgaaatcttgtgggcaagctgcgacgcgacgttatcgacaagcgttttcgtcgtatgcgcggtaagcttggaaaccttggcttcgtattcttcgcgctgtttgtcaagcttcgattgccaagacttttcaagcgtcgcaatgtcacctttcttgcgcgcgtcgtcgccttcgatggattccagccgttcgcgaagttccttcgcttccttttcggcgtctttgcgcaactgcgcttcgcggtctttggcgcgcttcaaagcgcccgtatcttcgtcgccctcaacgtcaaggcggaagccgtcgccgtcttcgatatattcggctttcagtgcgtccgaaagcttagcgtgttcttctttggtaagtttctttttcagtgccatttcaaggactccttgcggttatgccgattcaccgaatcagcgggaaagaatttctttaatcttgcgtcggaattcttcgtaagttagcggcctgtccgcatcatacttcggaatatccttcgcctttaagcgaccatcgcgcaaagcttcgccgccttcgtcgcctaatatgtcgtcttgcacttgggcaggttgacgggcaacccaagtataaaacgtttcttcggccaagtcactaacggtatttgccggggcaacgtgcgaccggcaacggatatgcgcgggcggcaacggcccttcgccgaagcgatagattcggcgatttcggcttatgcaaatgtccgttgttcttccgtcgattaccgaataccaaacgtaacgaccgaaaaccgcagacataacgccagccgcaacgaccgccgcaacgtgcgcggttgccgtatggattaccgaagcggcttgcgcgttgacccggtgcaactgcgacggcgtgccctgcgctgcggttccatcgccgacaagtgccgttaaggtttcttcaaccgtccaacggttcgcccaagctttgcgaatcatgctttcgacgccagcttgtgccgaattcgtaaacgtctttataaacggcagcaagtacaaaccatttgccggaattggcgtattcgtaacttgcgaccaaatacgttcgtcgcttcctgtaacagcagccaaaccgaacaaagggttcgaatcggcgttgggtacttctaaaagaaactgtatcgcttcttcgtccgaaataatgccgtcgctttcttcgccgtcaagttcgatataacccgtaacccatgcgcgccggtttacttccaagtcggcccgcatgaattcctttaactgttcaagtagcgtttgcgtgtatgcgctgtaaatcttcgattgcgattcccgtaattccgaaacaagcttgtttaactgcgccttcgaaagaccgtcaagggtcttataacgaacacgaccaagaaggcgcgttagttccaagtttacttcgcgaagtacgaacccgaattgtcgggactgccaaactttcacgtcttcgacgtaaacagcaaggcgcgtcgcaatatcgtacagtcgcttattgtccgatagtgccatgattgcgccccttatttagtgctgcccacattatcgccgccgctgccatcgcccggcacgttggccggggtcgcaagggccattgcttcggcggtatccttggcgattttttctttcgccttggcgtcgtcttcggttgcgacgccagctttacgcaagccggttcgcatttcttcgaaggtaattgcgcctttctgccattcttcaacaagcgaacggcgttcttccggcgtcatgcgggcaatgtcgaaatctgtattcagttcgaacttaacgccgctgtcggactggccgacccaacgggccgcccatttcaacgcccattcgaaggccgccgaaacgttcttggttgcactggaaagcgtcgaaccttccgaagcggcttccaattcggcttcggttgccgtgcgttgcacttccttttgttcgacaagctttgcgccaagtgcgaccatttggcgttctttggtatccattgcttctttaagcatggtgttttcggatgcttgaagcaacttcgcgtcggccccggcaggaagcggaataccgccgcgcgaaccgaagttaaccgaacctttaagaacgttcgtaacccattcttcggtaagtccgataagaaccggcgtcggctgtccgacgatataacaactttcttcgtaatccgccgaattgcgataatgcgccatattcagcgacgcaaggtcgtaaaagttcgggttgtccgggttcgaatcgttgttttccgaaccgatgaacataaacggaatttcggtaagacgattgccgtttgcgtcggttggtttgtaaacgacgtgttgttggtaattgcctttcggaatcttcgtgccatcggctttggtcggctgcggttcgcgccaaatttcatggacgtaataaccttcttcgtccaaacgcaaaacgcggaattgccccgacgttttcatttcaaaaccatcatcggcagcgcaccaagtttcgaacagtacgaccaacgacaaaacttcttccgcgccccggtcggtcgttcgccaattgataatttcagtcggcgaatatacgtacagggtcggacgaatgcgcccggcttcaaggtcggcaatcgacgcgccgccttcggcttcggtcgtcgggtaatcgaccaacagcccggcgcgggaatacgcaaggttcagcgatacggcctttttcgcaagctgcgtaaggttgatacccgaacccgtcgcgttggcgacaagcgggttcaacagcgcgggcacctttacaaccgggtcgcgcatgaacacttgaccgaccaagccgaacaaggttcgacgggctacgttatagaaaacggcccgcttcaagtacgcttcgtaacgcgccttattttctttcgattggtcttcggcgttcggcatcggaagataagtcgtccgcgcgccttttaccgttggttcgcccgcgattgcgtcgcgaatcaggtaatacagcggcagcagcttaccaagttcggggcgaataaatgaaacgttcggcatgatttgggttcctttaagttggcataacaagtttgaatttcgctgccgctttgttcgcgcctttcaatacgcgataacgcaccatatcgtaacaatggtcttcggcggttgtgtctacgtcgtccaatttcttttcgtcgcgcggcagtgtgggaagcaaatcaatacttgcaacgcaattcgacataaagtatatacccggcccttcgcgattaacagacgcttctagccggtcgcggaaaagctgcaacccgattacgcgcgaacccggcgatttgtccgattcagtccagcgaacgcccttcttcgacataagcttttcggtcgtgtctaattcgctgtcgattacttggcgaatgcggttgtcggcagggccgggccaaggctgcgacaaaatccagccgttcgccattagcgaaatttcgcggtcgattatgccttgtgcgatattcgacgccgaaagcttcaaacctttattcggtatatattcgcccttttcgtctttcgcgcatccgtaccattcaaacaactgaataagcgaaccgggttgcgggcaaaacgtaaattcggtgccatccgaaagaactatggtcgcttcggtgccgtccgcttccgcccaccagcccacactaaacggatgcgaagacccgtcgtcatatgttctgtcgattcgccagcttggcggaatgacgaagcgcggtacaacgtgtatatgcgattgccaaaggtcgtcgattgcgccgcctgcggtaacgtcccaatcgccgtaaagccaagccttccgcaagttcggttctttgatactttccagttcggcgatatacgaagccggaaggtatgggttttccttatacgaaccgaagatagcgatttggctaattacgtgcgtttcttctttttcggtcgccgggttgtaaatctgaatttcgcgacgaactacggtgccgcgcggggcaattgtgataaagcgacgttttacccaattatgaccggggccgcttgggttcgttgtgctgaatacttcgcactttacaggcggcagcggttcgccgttcggcgtcaaatagcgcccggttttcgggtctttcggcgtgtcttttatcgggtcgaacgtacagcggttgaccgacataaatttgtcgtaaaggtcgccgcttggatgcttcgtaagttcgttccaaccgataaacgggtattcgtgaccgtggaagccttcgtaatccgacagcttcttaacgtgccgaaacaacagttcttcgccagtcggccaaacccatttataagccgacgttgattcgtaaaactttccgccgtcttttagctttccgttatcgccgaaccattttttcgattcggcaacaaggccgcccaaatggtcaaattccaaatcgaagataacgccgcgccagaacttgccgtaacctttgccgacgttacgataaaagcgcataagctgcgtaagcgtcttgccggggccgcgtgcgccttcgtacagcgtatgcgctgccatcgaacaaagggcgatagtctgcgaccccggaaggggcttaaatacgacttcatacggaacaggtttcgccccgttcgtatcaatggcgagtgcgtgcattttctaacaattcgcgctgttgccgtgcggcttccgcttcccattcgctttcgttagcgaatacgggcatttcgacgacgcggtttacgttcgtcgttacgttaacgttcgtttgcggtttttcgatgaacccgcgaacgtcggcataaagcttggcaagcttcgcgtattcttcgggcgtcggcggaatggttacgccgttcggaagcgtcgtaccttgcatacgctgccaaatgtcgcgggcaaggtcgcctttgcccggaagaaatgccatatcgccgccttcgtcggtaaggcgcttttgttcggccttaacttcggcgtcgttcggccaatggttcgcaacccatagcgcgcgattcgtgttgttcggaaacagcgaaagcgcagccttaaacgggtcgcgttctttcaaaagaagggccgcgtatgcggccttttcttcgctttctttcagttcgtcggacatagtgtcggcctagtttatacgtcgttggcttcactataccgcaagccccgcgttctgttaaggcttgtccgcagatttaggcggcgactgcggcccgcaattgcgttcgacggcttcgttatggttcagaatttgccgggccgtgccagcggtaaagccgtcggccttcgaaatccaaataggcgcaacccatttacaagccgtgtcgattacaacgggcttcgtttgtactgcgtcggcgatgctttgcggttcagtcgcgcgaccattcgtcgcgcagccgcctagtaacttcgtcgtcgtcaaaagtagaattatcggaagcaacgtctttcgcattttgcaccgcctttacctgttgttcggaagcttcgcgggcttcgttaacttggcgaactgcgattgcttcgcggtcgtttgcccgttcgtttgctgcgttggcttcggccttggttgcgccggacttgcgaccggcataaaaaatacttgccagcatgacaagacccgcgccgattgcggcaagccatttgccaaacttggcccaaattacggaaaacatacgttgcccctttacgcttcattcgtcgaaagttcgccgttcgacttcaacagcggcagcgaatagcggtcttcgaacggaacgcttttaactgcggctttgtttcgccagaacgacggccagaaatagccggttacgcgggatactgcgaacggtgcgatacttacggcgttcgactgattaccgccaagaaccataagatttccgcgcgcatccttgcccacaataaaaccgacgtggccgccgccgcttcgcgtgaaggtcacaagcgccccgtatgcgggccggtcaagcttcgtaagctgcggggcttcccatgcccgcgccctgtaccattcgcgaacgacgtagcgcccggcaacgcccaagcaatagccgacgaacagtccgcaccaaggcgtttcgtcgtcgtgccaccaagcgcgggattcgttggaaaattcgcccatgcggtcaagcatggcaagaagcttcgggttatgcgaagtcttcgaagtgtcttcgcgaaggccgatatactttcgggcttcggcaacccaaggaagttcgttattcatcggtcggccccttgtacaagttcttttgcttgacaaggcgggcaacgatggaaagcgcgaagacaacaacgccgataagcggcatatactgcggcggaatcgacgacttcaattcgtgcggaagaattgcccaagcggccaacgctgcgtcgggaaacgcaacaagaaggccagtaattgcggtgccgactgcggccagtcgaaccgaccaaaagcgccagcattcgcgccaatcttcgataagttcgggcttcttcatttgtcggcctttttgtctatcttgtcttcgatacggtcaagctttgcgaatattgcggcaatatcgcggttcatatcgtcgcgctttacgtagtgcccggctacaagaacttcgatattgccgaccttatcggccaactttgaatcttgcgcttgaagttctttaagcgactgccacataacgcgcatccaccaaccgcccaacgcgccaataattgcgacggctacgttaaaaaattgttgttcgttcattcacaagccccggccccgaaatgtatttggccgaagattagcacggattagcacaaattgacaagaaaggcaaaagaaaaccccggcgcaatggccggggtttccgttgaagcgtaggcgtagggcgggccgtagcccgcgccgttgcttacttggtgcgccagacgcgcgcgccgccttcgaccgaacgaacaacgaacttgcgggtttctaccatgacgggcacggtttcacccttcttgttggtcttggtcgcgccgtcttcggaaggcacggcgaaacgggcggttgcgctggaaacggtcgaagcaagcgacttcgcggcgttcggcttgtcttcgctgttcggaacgaagaagctttggccgacttccagcgcgtcgaacggatagacgttgccgccgcgaccgcgaccgctgccggtcggcattggtacgttgtcttcgatggcgaaggaagtagcgaccggggcggaagctgcggcggtgccggtttcggtgttctggttcatttcgtcgattcctttttgggttgcgcgggttgcaatttcgcccgcttcgttggttactgccgggttgatttctaccataccggcttcgataagcgggccatgtacggcaggcgaagtatacaggccattcggcccggctgcaacaatttcggcaaggccgataaccggggcggcggtgttcttcttcgcggtcgatttcttggtggccattttgtgtaactccttgacgttaaggttatgtcgcgttgttgcgacgggttgattttacgccgaccgttcttcgtgtcaagcggtcaacgcaaaatttcttcgatttctgcgatgcgttcgggcgtgcattcagaatcgtaaattttgtcgtaatccggccaaacgccgttcgctacgttgtcacaatacagcaggtgcgcgcgggcttcgtcttcgaagtccatttgcccggccataccaagcaacgcgacgaaggcgacgattccagcgataacaagaagattgcgtttcattgtgggcacctttgttcgtttcgatggttgaagcttacgacggcttcgaacctttgtcaagcgaatttgcgacattttcgtaaccgacttgcgcaatacgttgggccataaggcaagcgttctgcgcttcgattaacgacgacaacagcttatcaagttcgcccgcctttggcaagcgttcgataacttcgatttgcgcttgaaggtaagcgtattgcatcgaaagggcttggtacattgtcggcgctgcggcaagcaagttatacaacgccgggtcaacggtaacacgcggcccgaatgcgacgaagcttccggcttggttgaacgggtcggccttcggtgcgccgatatagttttgcgtcgtcgggtcttgatagaacaacaagccttcgatttgcgaatggtctagcggtttcatgttcgttaatccattgtaaacaggcattcgacgcccgcttggttaaagatgcgttcggcttcgtcggcagacgcgcgccagtctggcgatatatgcccacaataagcgacgacgcgacggataccggcccgaacgatgcggtcggcacaaatggcgcacggaaacagcggcgaaacgtacagcgtacacgcggacaagtcttcgccgggcgcagcctgtcgaattgcgttgtcttcggcatgaattacgacggcgtgttgttcgtcgcgcatcatgcgtagaaatgcggcgtcgtcaaagtcgcgcggcggcccgttgtatccaagcgacgcaatcgaccgattcgggcgcacgatagccgcgccgattcgcttgcgtggccccttagaccatccggcgacgtgttcggccagttcaataaagcgggcatcccatttcggcagggccgcgcgcggggcatagattacaggcatacccggcgcgaccgttcgaccatagcacgttcgctaatgcggcgcagttcttcccgatgcttgcgggcttcgaacgcttcaaacagcgggcgaacgatggcgcgatgaatcgcaagggcagcaacgacgcaaagtaagaaaataagtacgttcataataagcttcttcctatcggtaaggcttctataagccgttcgtattccttgcgcttatcttcgtataaccttcgttcgttgtcaagcttctttttccaacgacgataaataattgccgaaactatggtttcggtcacgcttacgacgattagcacaatttcaagggttgaaagttccattattcgtattcaaccgcccttaacgacaagtcgcctttgaagtttacgacgccgtgccctaagtcttgcacgatgaaaccgcccgacacgtattcgaagtcgccgctttgcagcatttcgcccgcgtggtacagcgcgtcgcccatgcgggccgcctgcgcgggcgacagggccgtaacggtcgcggacggggcatcggggccgttggcccggaacagggccgccagcatgaagccaaggacgacgccgacggacagggccgcccaaacgataagccaagacattttcgttactccttcgttaatagcaatcgtaatccggttcgtaatccggttcgtaatccggttcgttgtcaacgtccgattgcgaatacgaatattcgcccggccccgcttcgtaaagcttgtcggcgattgcgtccaagccttttggaaggtctttataatcgacttcttcgccgtcgataaagtacgtcggttcgcccgcgtcgctttcttccgggtaacaatcttcgggcgggccgctaatgtaagctggcgcatacgatacgccgtattcgcacgacaaaacgcgaccgtcggccatttcgaattctgttgttacggtatatgcgggcatggtcgttactccttggttcgttcaacttacgaagaagtgtacgacagcttcgaagctacgtcaagcctttttcgcaagttgcagcaacgccgaagccgacgaccgtttgccgacgcatacgttacgcggcgtgcattcgcggtacagcagccaataacccggcttcgttacgacgaaacagcgtttcgaacgcgcaatgctgcgggcttcgtctatcaattcttcgtcggtctttttcattgttcgccccttatcaagtgcggtcgatacggcggcaacttcgacgcgcgatacagcttgccgccttcgacgtaataccgttcaccatagcaaacggacaaatgcccggcgatgcggtcaaggggccagcccacaagggccagcgccgcagcctttaaccgggcgcgggttagttcgcattttaggcaattcatgggttcggccattcgatataacttcgaaggcagcttaccgcgtgttcccaaccatagcacacggcccaaccgtagccgacttcgcgggcgtattcgccgaagtcccgttgttcatccgatacgccgccttttgctgtttcggacttcgggcgttcggtcggcttcttcatttcgatataaaggccgtgccaaccggcgttcggccacggcaagaacgtatcggcgacgccctttcggacgccttcggccttggcgttcgccccgcgcaccttgtcgccgtggccttggttgtggatagcgtggaaccattgcagggccgggactgcgggcggggcgtccgggctgcgcttgggcaaggtgccgccattcgaccattcgtcggcagcgtcaaagccatgaagatatgcaacggcacaataggcaaaaagtgcggcttggtggccgtgttcggtgccagacttggcaagggttgcgggcgtcatgcgataccccttcggtcacgacagcgaccgcagctttcgacgacttcgcccgttcgcgggtcggttacttcgacaacgcgcgcgaagtgttcgccgcaaaaatcacattcgcccggacggcctgcgggtatcgctgcggcctttcggcaaagttcgccgaccgtaaagcttacttcgttttctattcggtcggctgtttggtctacttcgtccgccatgttctttcgttccccatgatagaaagaagccccgactatacaacagccggggcgctttggttagtgtttcgtcgcggccccgccttcgcgttcggccattacacgcgctacggcctgttctggcgtttcgccttcgcgcagttcgacgcggattgtttcgaccttgacgccgcgcccaagggcggccaacagggcgtcgggcagttcgccccggtcgttcagcaagtcggcggagttctgcaagcgcgcgacgtgttccggctggaacgcttcggggttggcttcgtgtacttcctgcgcgacttccagaacatcgcccaaggcttcggccagcttttcgaccaagccaaggattttggcgcggtcttctttgttcgggccggaagcttcgacggcctgtttaatatcgcatacgatgcacattgttataactccttcaaaaatgccgggttgcgcccggcgcgtgttcgaatcatacgacgctcattcgttagttgtcaagctgcaacgacaaacgcgcgtcaaccaatgctgctagtttatcgggcgtcattgttaagacccctattcgtcgttttgacaatagcaacgatttgtaatttcgccgcaatgcgtgcaaatgccgtcggcggcaacgttgagaatatcagcgcgcacgctgtcgcacatttcaaaagttcgcaaagcattgtttaaaagcttcgccgcttctttcaaatattctatttctttttgattagccattgcgaagactccttcaaaaatgccgggaagcgcccggcgcgcttttggttacttccaaagacgaccggcgttggcttcggcggcgcaatgttcggcggctttggcaacaagcttcgcgacttggtttacaacgttcggaacttcaagcgcgaaagcttgcgccgccaattctacggtttgcccgttggcctttgccactacggccaaggcgtcttcgactgcgatttttacgaaggctggcgaagctacgaagttttcggcggtgtaagtcatttcggcggttccttgtgttcgttggtatgggtctatagtacgacggcttcgacagtacgtcaacccttcgaacgaatttttttttatccttttcggtaacgaagttgtttcgtcatttcgcgcagccttgcgacgcttacgccgccgctactctcgacacgaataaagccgctttcgcggtcatacgtgaacgacaacggacgaacgccgtaaacggccttatatgcggcggcgtagtcgttgaacgcctgttgaacggccttcggcacgcttccagctttgcggcgttgcttcggcactttatggcctgtttcgagttcgtacattagaaagccgctgtattgattcgataaagtgcggcgctactgtcgataagttcttggctttcttcgtccgacaatttacgcaagaaaccttcggcttccatcgctaacagtccgtcgcgaattgcagccgttgcgccttcttcgttcttgcgaaaagccgcaatgcttacgacgcggcgttgtatgtatgcataaccgatacaacccgccgcccttgcctgcggccccttggcgtcgtacttgaccaattcggcttcgtccgcttgcaagaattcagaaacaacgcgcttcaagtgcgccatttgttcgccagcaagcgacggcaagtctttagaaagccgttcggttttcttcgggtcaagcgacgtataaaacaacgaaacgtcgtcattgttgccaagcctgcgaacttcgcaacccgcttcgccgtggtcaattacgacaattcgtttcggcttataactttcggccatctttcgcaacatgcccacattgaagccggggccgattgcgaaagctttgtaaacaggaacgcgggccgctggttccatcgcttgcgcgtgccgcatgtattcgccgccaacgtgcgacggttccagccattgcgattcgtcggccttctgcgcttcgtcttcgcgaacttcggtttcttcggtcatgttcaaaactccttcggttgattggttcggcaagcatagcgcagggccgaaagcgtgtcaagcattattcgttatttttgttattagatgaaccttatacagattgaagggttcttatagtccttaagtccttaataaataaagaaatataaataatataagatatataatacctaatttgtctagtataatgtataacaggctgtctatggctaagcaagggttttctaccctactttctattattgttatatttaagggtagactgccttatatttctatgaaggcttataagttctttagattcaaggacttacgcgcaaaacacgttcaaaacagccttatacgtataatgttaataagaataacaaataacaagaacaaacaaaaaagaccgccgaagcggtcaaagtgtgaagcttagaagttccaaggcttcgcgttgcgttccttggcgacttagaacgaactttgttttcttgctggcgaagtaatgggcgaacatggttgttactccttcgttgtttgcttcgatggttcaaatatacggcaacttcgaagcttcgtcaataggtacgacgaacttttttacaggcacgaaaaagccgcccgaaggcggcccgttctgcccacactggcgggcgcgcgttacaggccgaaaacgcccggatgcgcgaccatgtatgcaacggcgcttgttccgtaatccttcgccagtgtggcccggcttacttcctgcaaatcgccgcgttcgcaaagggtcttcaatgcgcgcttgattgccccgcttgcgccgatgcggtctttacgaaagacggcaacagcggcaagcctgcgttgaacgtagctgtacggaacaattcggttcgaatgaaggtttgacattccttcgcctgcgtacttcgcaacgtccggccaaggtgaaacgacgaaatctttaacggttgcaataaccttcgcaagctgtttcgtttcgtcgttgtctatgccaatttcgccagcatcgaaccgggcaagcaagttgcgaacgtcggcgacgacaaggttaatcacccaagacgcaacgtcggcggtaatggttgggtcgtaagggttgcagccaacggcgataattccggccagcttcaacgcctttacgtgcgcccggttccaaaggtgccgccgaacttcgcggtcgcttgtgttaatgttcgcgtcgcaatgcgcgtcgaattgttggaacagttcgcgggcggttgcgtcggtttgaacgtgaatcgccttatgctggctgttcagcattagcgcatgggcgcacaaggtcgaaagcctgtcgataagttcgaacgaaggttgggccgacaggtgccccggattcaacgccgggcgttcgccg

SEQ ID NO: 29 - DNA, 65323 bp, Abidjanvirus EPa43
  source 1..65323: mol_type = genomic DNA; note = EPa43
tgaacaactccaggacggagctcgggcgagtgaggaagcctcgtgggcatctggtcatgaagacgttcggggtcgattctgtcgtggcgcttgggctctgccgagagttcgggttgggtccgggggagtgcgtatgaccttcctcgttcagcagggcgacctggaaaagcactggctggccacacccgtggacgttgtgagctggctctgcgaccactttggctggcgcttcgacgaacgcttcgagcggctgctccctcagttcgagaccttgacacctgggcgttcgctccaacacgaggatcttgggctggtggtctcgaggctgtggctatgaacgatgtcatcacgtgtccgaagtgtggacaaacgtccgggaactcctggtcgcagtgtgaaggacgctgtcccatgagcgtgtcgccgtggttcgatccgacgcttggctatggaccttcgacgttggacagaggacaacggacggtggaccttggagctgcacacaacacacgagttggagaaactgagacgccatcgcgagaggttcgccaaccttgacacatcggccttgcctcttcgttcgcctccagcgaccatgagcgccgaacgaaccacgagggccgaatcatgacttgccagaaatgcggagccatcaacgatcgcaagaccagcaagcacacatccttcatcgtccagggccgccgctgctgcggacactgtgggtcggtgatgggccgttccaccaaaactagctgacagaggtatctatgacaacgctgaatgacgcatccgccaacgacatcgtcgacgccattgggccacgctccaaggctcgcttctgggtccacgacgagacccgccgctgctccatcaccctgggcaaagaacccgccgaggagaacctccaggagggcttccgcgaggttactgccgaggagcaggacgccttccgggccgaaacacgtgcccacttcgctcacctgctgaagtgaggtcggtatgagcgacattcttctcggcaatcgagcggtgctggtcgccgccaaccacgccatccaggccgcagagcgggtcgaggagctccgtcgggagctggcccaggcagagtccttcctggttgctcgacgctgcgaggtggtcgacgagctggacgctctgagggcttgcgatccggacgcgtggcctgcccctgggctaacgtccctgcagatgggcgagtggcgcgtggacatccagccccggtactacgactgcacccagaagttcggcggggtggaggtctcgaagatcgtccccgagcagctgaccaacatcggagaggcgatcgcccagatcgaccggcaggtgggtgcggtcgtgcgggagaaccgggcgaaggctgactgtggctgcaatcccaagcagaaggaagcgtgtgcccgtgcgaggcacgctcgaccgaacgacccagtcgttggcggctgccgcaacgcctaacttcgcccgacttaggttgcccgagcccgactctagttagttatgcgaactagagtcgggtttttgcattaaaagcctgcaggaacaacaacttacgctgcccgactctagctacttgagttactcagccctttttaaaacgctaggcttttgaggcccaggcgcgggatcaccgcctcgggaaggctctttttatactctctcttctctctaaagaaagtagagtaactagagtctcccctctaggaccctgtgggcatgcgggtcacagctgtctttagataaagcaaggccatgtgagcaactagagtaacccgagtccagcggagcctccctgggcaggaagacaaggaccattgtggtctcagtccaggggccttcgctcttgtctctaggcgctccgcgaaggaagattcacggcaaattgctgatggaccaaccaccatgactgacgaaaataaccgccacctcggagccaagcccggctctcagcgatacaccggcactggccgaaagttcaccgaggatcgttgggagatcttcctccaggcgttcgccaagacgggcctcgtcaacaagtccgcctgggcagccgacgttgtgccctcgacgatcacccagacccgcaagaagcaccccgagttcgaggagatgttccagctggcgctgtccgactaccgtgagtcgatcgagcaggagatccaccgccgcgccatcgaaggctgggatgagccggtgtaccagaagggtgagctcgtcggcactgtgcgccgctactccgaccgcatgctggagctgaaggccaagcgccacatcgccgagtaccgtgacaaggtgaccgtcgaccagaccgttcgtggaggcgtgatggtcgtccctggacaggctgccgatgccgatgcctgggagaaggagttcggcgagaaggcgcggggcaccacccgccatgagccaggggcggacgactgatggccgctgctgtcaagtgggaggttgacgcactaggcgggctccggcccgtcgttcgcgacggctccaacgtcatctacccggtgtgggcaccccaggagggcagccaacaggcgttcctcgcctgccctgtgttcgagaccctctacgagggaactcgaggcccagggaagacggacgccctgctcatggacttcgcccagcactgcggtcagggcttcggggcagagtggcgaggaatcctattccgccagacctatccccagctggtcgacttgatcaacaagtcgctgaagtggttcccgctgatgttccctgaggcgaagtacaacaagggtgaccacacgtggacgttcccggacggagagcagctcctccttcgccacatgaagtcgccctccgactattggaactaccacggccacgcctatccctggatcgggttcgaggaactgacaaactggcacgagccgacctgctacctgtcgatgatgtcgtgctcccgctcgaccgtccctggcatgcccaggaagttccgcgccaccacgaacccatatggtcctgggcacaactgggtgaagcgtcggttccggctgcctcactaccgaggcaaggtcattcgcgactcgtaccgggacggtgacctggagccgccacgcgtcgccattcacggcaacatccacgagaaccggatcctgctccacgctgacccggactacatccagcgtattcgggctgcggcccggaacccggctgagctggcggcctggatcgacggttcctgggacgtcacctctggtggcatgttcgacgacatctgggactcccagcgacacatcctcccggccttcgaccttaccaagatccctcgtggttggcgcatcgaccgctcgttcgactggggttcctccaagcccttcagcgtgggctggtgggccgagtccaatggcgagccgctcacgatcaacggcgtgacctatggccggaagcggggcgacctgattcgcatcgccgagtggtacggctggaacggcaaccggaacgaaggcgtcaagatgctggcgaagaacatcgccatcggcatccgcgaccgggaggacgactggggcatcgctgggcgtgtcaagcctgggccagcggactcctcgatctacgacgaggagaacggcgtctcgatcgctcgggacatggagaaggagaaggtcttctgggagaaggccaacaagagcccaggttcgcggaagcagggctggcaggccatccggaggatgctcgaaggagctctcccgcccaaggctggcggcccgcgtgaggagcctggggtgttcatcctggcgaactgtcaacagttcatcgagaccgtgccttcgatccctcgggatgagaaagacccggacgacgtggacacaaccgccgaggaccacatcgcggacgagttccgctaccgagtcctggcagtacggaagacggtgaagagcggtgggttctgacggaaccctcttgctgttcctccgtcgcggcccgataatctagcgacccgtaggagacaaccatggattattgcacgttctggcctgaaggctggtgggcctattgctgcaaggcccacgacgaggactatgtcgctcaggtggggcaggccctggctgatggcagcctgttccagtgcgttgcctcctcggccccgaccccagctctggctgtgatagcctcgctcgtcggcggagtgatgtgggtgggagttcgagtgttcggctctcgcttctatcgcaaagctggcaccaccaacccaaccaaggatctctgacgatgagccaacaagccaagaaggaggcgaccccggcaacgccgagtagcgcctacgagtacatgaagcccgactgggacttggtcaacgccctcctgggcggaaccaaggccatgcgcgaagcgggcgagacctacctcccgaagcatcgccgcgaatacagcgacgactacaaggagcgcctcgagaccaacgtcctggtgaactacttcgagtggaccctggagggtctggtctccaagccgttcgctgaggctccgaagttcgacaaggtgccatcggagatcgagaagcacatggacgacatcgacctccagggtaacgacatcgtcgtgttcctccgcaactggttccgcgagggctacgccaaggcgttctcccacgtgctcatcgagttccccagggtgcaggcccgcgaggacggtcagccccggaccctggaagacgaccgcaaggacggcctgcgcccctactgggttcacgtctgcccggagaacatcgtgttcgcccatgctgagatgatcaacggggtcgagacgctgacccacgttcgcatcctcgaagaggagacggtggtcgacggttgggaggagaagacgattcagcgcatccgcgttctcgagcctgggcggacccagctgtggattgtcaaggacaagaagtggaccaaggaagacgagtggaacaccggcctggacttcgtgccgctggtcaccttctactccaacggtcgcgagtcggtcatgaaggccaagcccccgctgctcgacctcgctcacatgaacgtcacccactggcagagctcctccgaccagcgcaactgcctcaccgtggcccgcttcccgctcctggccggttccggcgtctcgagcgaggacgctgacgccctggtggtcggcccgaaccgtctgctgacgactacggccccggacggcaagttctactacgtggagcacaccggcgcggccctaaccgctgggcagaaggacctggaagccctcgaagggcagatggcagcctacggcgcgacctacctgaaggagcagtccggcacccagacggccacggcccgcgccctggactccgctgaagcgatcagccctctcaaggctaccgtcatggtgttcgaggacgcggtcgagcaggcgcttgatatgcatgctgcctggatgaatctgccagctggcggtgaagtcgagttcaacaccgagttcggtcttaccatgggcgaccaagccggtctggacgtcctgttcaagactcgccaagcgaaggacatcagccgtgccgcctacctcgaagagctgaagcgccgtgctctgctgaagggcgacttcgacgctgaagccgaccaggagctcctggacgaagaggctgccaacggcatgccgagcctcgacctggatccggcccagccgaagaccgacccgaacgagccaccggcccctaaccagccgcctgtgccgccgactggaggtgcctagtgatcgtgctgaagctgatgctcgcatggttggccgtttcgtttctcgtaggcatcctcctgggccggtgcatccggttcgggatgggagaggaaaaccaacatggcgaatgctaacgacaggctgttcgatctggcgcttcggcaccagatcgacctccgtcggttcactgtcggggagctgaagcgcattcttcggctcctcgagagcatcgacgcagaggtgacgaagaagctccggcgcgaccttgtggggctggccgacggcaccccgctgtcgttcactccggagcaggagaagcgcctccaggccatcttcgctgatgtggcgctggtgcgcgaggccgggtggaagcaggtgaccggcgagacgacaaagtcgctggaggagctcgccgtcatcgaggccgatgtggagctcaagacgatcgagagcgcctcgccggtggtgctccagctgacaggcgtggaggtgtcccagcttcgcgctgtggccgtctcccgaccgttccatggcaagctcctgggtgagtggttccagggcctggaggtcgccgaccggcagcggctggagcaggcggtgcgccttgggcttgcccaaggtgagaacctcgacaccatcgtccgtcgagtggtaggaactcgagcgaacaattacaaggacggggcgatgaccatcagtcggcggaatgccgaggccgtggtgcgaaccgccatcaaccacacgtccaacgcggctcgcgaagaggtctggagccggaacgcggacatcctagtcgggctgagggtgaccgccaccctggacgggcgcacgagcgccgtctgccgtgcgcgagacggacagtacgcgccggtcggtagcaacccgctgccccagggtgtggagcgcctctcgccctctggagcgcgtcctccgttccacatcaactgccgtaccacgatggtgccggtgcttggtggtgagcagatcctgggcgagcgggccactgtcaaggatactcgcaccaccaagcagatgacgaaggacttccgagccgaggccaaggccgctgctggtgccaagtggtccgggctgagcgaggcggagcgccggaagctgatcgacaagcgccgcgtggcctgggcccaggagaacgtcgggcgcgagcctgaatccacgaactacaacggatggctgaagaagcaacccgccgcgttccaggacgaagtcctcggggcggccaagggcaagctcttccgccagggtgggctggagctcaaccagtacgtcgatcggaacggcaacgaactgaccctggagcagctccggggtcgctatccagatgctttcgacaaggcaggaatacgatgaaacacgtagtttgctactctggtgggcacagctcggccctggtggctatcgaggtggtgcgacgtttcggcaaggaggacgttattctcctgaaccacgatatctcggctaacgtggaatcggaggacgtcaagcgattcaagagggaggtggcggaatacctcggactgagcatcacgtatgccaacatggatgggtgggaggtaaaggatcccattgcggtgtgtctggagattggcgggttcaaggggaagaaccaacatgtgctctgcacctcccgcctaaagaccgaacccttccaggcattcctccagtcccgcttcccagggcgcgaatgcattatttactacggcttcgacgctaatgagaggcatcgcatacagcgccggtcctctattctcgcggctcagggataccggacggactccccactggctctctgggagcgcactatcttcagcacttaggaggtcggtatcgctcgcccgaacacctatacccagtccaagcacgcgaactgcaccgggtgtctgaaggctggtcgacaacactggtacgttgtctattgcacaaggcccgatctatgggagcgagccctgggagccgaggaggagaccgggtttacaatcatcaagggaactagcctccaagagcttgaggacaagttccgccgcatgaagctcctgggggtggaaccatccgagcacacatcaccgcaacgcttctgggccaaagtccgcgaggcgttaggcgctgaagcgttgcggctggaggccgaggagaagaacgaaattccatgcgagtgtacggagggttgacaaatggctgagatcatcaacttcgcaaaggcaaaggaagaccgtacaccccacgctagcggcccagcccgctgcctggagtgcggacacgaatggcacgcgatcgcacccgtgggcgccacccagctggagtgctccgagtgcaagacgatgaagggtgtcttctcgctgcccttcgctcctgaagtgcactacgcctgcgcctgcggcaacgacctgttctacgcgacggagttcggtgtcttctgccccaagtgcggcgaggaagatgatcatctggcagacgacaactgacaacggaacgccccgaggcacggtatgctgaagggcgttgattcacttcccgaggccaccctatgaaacgacgcgagcagcgctacccacacaagcccgacgaatcgcaagggctgaagatcaagcgcctgatcaaggcgaagaccgccacccaggcccagctgctcgacgcgctggacgacaccgccctggtgatcgccactggcccagcgggcaccggcaagaccttcctcgcggtctacgcggcgctgaaggccctggtcgacggtcgagttgacaaggtggtgctgacccggcccgtggtcgaggctggcgagcagctcggcttcctcccaggtgacctggaggagaagctccacccgtacctgatcccgctgatggacgcggtcaacgacctcgttgggccgaccatggccaagaagctccgggaagacggcatcatcgagatcgccccactggcgttcatgcgtggccggacgttcaacaactgcttcctcgtcgccgacgaaatgcagaacgcgacgatctcccagatgaagctgctcgtgacccgcatgggcgagaacgcctcgttctccctgaacggcgaccccgcccagtgcgacctgccctccaaggaagacaacggcatcgcctggatggccgagcggctgaagggtgtggaccaccgcgtcagcgtggtggagttccggggcggcgacatcgtccgctcggaaatggtgaagatgctcatgaagcacataggagactaagttggacaagtgcacgaacgtctgtggcctgacggtggccgctctgaaggaggccggcgagaccggcctggaggttcgccgcccgagcgggaaggtgctccaggtggtcctgtccgggaaggactacaccatcgaccagccgagccaggaggagcctgggcacacggtgctggtcgaggtccactcctccctgggcgctctcaagaaggcgttgcgaaagtattgacacaaagttgttgtcgctcttcgatgggcctgacacaataggctcatcgaaacgaaacacagaaatggagagacagcgatgaacgcccaccagacccaaggcaacctcctccacgctgacgcgaacaagcatctctcccaggctgcagcctaccacgctgaaatcaaagccctccgccgccagataggccagaccggcgacatcggacgccagggcctgctgaagcgtgccatcaaggccaagactgagctgtccgagcgtcatgcccgcgctgctgcccgactggcttgattcgcaacttagttgttgcccatcttcggcgtaactgacacaataggctcatcgaaacgaaacacctcagaaaaggagcgacaccatgaccaagttcaccgccgcttacgaagctggttttgctgcaaagaagaaagaaatctctgagatgggtttccacgcagctcgcgacaaattcaacattgactgcccggttgcggttcagtggacaggaagtgcagagggcttggaatactccaaaggcgaaatggcagctttggaggaatcgctgagcaagggccttcatcgttagccaacccgccccggcccacctgggctcctcatttcagaaaaggagattcaccatgccacatcgtctcgtaaccttccgccctgccactcccgaagaggtctccgcctgggaggagctccgccgcaacttcctgagcgccctggcccagctggccgaccgcgatgtggagcgtgcccaggacctccaggaccgctacgacgacgagtgcgctcgccgtgggctgtcgttccgcctggaggccggtgagctccaggtccgcgtgatcgagcgagtcaggcagtccatcgcggcctgaagaaagttgtcaacgcccgcttgccttttgcctccgccccagcgaagatagtcttacgccggggcggtcccggctagaaaaggagaaaatcatgaactacgaaactcttcaagccttcctcgctgagctgctcccagctgccgaagtcaagcctgctcgcgagatcgctgctgactggttcggtgttgccgtcaccgtcggcgaccaaatggccaccatctacgcctgcgaagatatcaatggccctggcgagcagggctggctggtcgaccacttctccgtcgctgagaacgacccgatggccttcgtccccgacgtttgggactttctcgacgaggctcgggctgtccaccacctgatcggttggtacatcaaccgggtgtgacgacccacggccccggaaacggggccacttgcccgtcttcggagcggcaggcacacttgcccttcgacaatgccaagaaatggagaacacgatgcgagccgtcttgtatgcctacgacctggagccgattacggttctggagctcaccccactggcctggaacttcctggtcgagcgtggagtggtccgcctgccggtgccgccccaaccttccctcatcccaagccacggctctgtccctcggagcttcgagctccgcacggtgaccatccacgcggagacctttgtgcgtgacaggcagcgttccctgatgctgttcacccatgacgaggagaccgccctgctcctcaagagcgccctgctcccagggcagatcaaggaccatcaggacgcggagcgagccgcctgggcacggggcttcatggcagcgttggactccctgggcatctagttgttgtccactgtcgaagttcgttagatcatctcagcgtcggtcgactgggccgacgcagaaatggagaaacaacgatgtccccgaaagagctcgaacgcggcctccgcttcctgctgaagaagcacaacgaggaaggccgtaccaaggtcctgccccaccgcccccagcgcatcacgattgtaatgtcctgccgcccggcggacggcctgggcttcagcgtggagttccgccatacggtcaccaccatctcaatgtttgacgcggagatccaggcccaccaggaggccaagcgccagggcctgcgccagccggtcatcctcgacaggatcatcgaataacagttgtcgaacgtcgaagcggggtccatactctgcttcgacttcccaaccagaaatggagacagcgatgtaccgagttactgatgtaagccccgagaaggccaagctctacaagacggcccgcctgaagaaccgcctgggctccatgcccgagggcactttcgtagccgtccgcttcctccggaccgacctccacggcaacaacatctacttcgtggtggatgccatgggccgcgaggaacgcgaggtctgggaagctgacctgaccgacttctgcctgtaaggagctccgccatggtgtatgaagaatcagcaacaatggatgtggaactggaggacggctccatcgaagtccgcccagcgcagctggtcttcatgcaccagctggacggctctgcccggctggtccacgccgagccggatcactgcctggacacggagctggtgctctggttcgtaggcaatcccacccccaagattgtgaaggtagttccacgtgaccaagataccgaacctggagttcactgtaacgctcgttgagcctcatcaccgccgtgtcctggtccagcggctgcgcgccgtagcggaggctctagaggccgaggaggcggagtgggtaagtggtggggccgtcctgcagcctatggaggacggagtgttccggctcgagtccaaccttgagatcaagatagttcgcaaatagttgttgtccgtcttcgactctcaggagagtattctcctgtcggcaacgtcgccgaccccaagaaatggagaaacaagatgaccgtcatcaaattccccgccaagtcccacacctacgttggcgagatgatccgcctgcctcgccccgaagcgaagttctggaaggtctacaagattgtggatggcaaggcatacgcgaagcctgcaggcttcggtaccgacccacgcgtcgcttgctgctaattcccgatcctgacacgcgaaggcccagggcgcttgtcctgggtcgaatccatatggatgattcatcctacccgtggagatcacgggaatcattgtgggtgagccacactaccaggagtcaacaatggatttcgaatttcaagaagtcgagtctctcgacaacgtccccgagcagttccgtggtctctacgctgaggccgacggcaagtacaagctgaacgatacctacaagggcgttgcggaagccgtgaccggcctcaaccgcagcctgaaggcttcccgcgctgaagccaaggcgttcaagggcaaggccgacctgtcccctctggccgagttcggcgaagaccccgccagcatcgcggaaactgtcaaggcccgcctccaggagctcgaaggccagctggctaacggcgacaaggccaagctcaacgtcgacaagatcaaagaagatctcgccaaggcgcattcgaaagatctcgagaaggtcaccaagcgttccgaagctctgcagacccagctgtacggcctgctggtggagaacgcagccaccaccgccatcgctgagctgaagggcgtcccagagctgctgatgccgttcgtcaagacccaggtcaacgtcctggaagaagacggcgagtatcgcgtgttcgtggtcgacggccagggtgatcgccgctactccggcgtcactgggcagcccatgtccatcaaggagctggttgctgagatgaaggccaacgagaagttcggtcgcctgttcgagagcgaagctccccagggtggcggcactcctccgggccagcgccgcccagtgcaacagcagcgcggtgagatgtctgctaccgacaagatcaaggcgggtctggccaagggtcaagccgcttcgcgtggcggcctgggccgtcgctgatcaagtaagctccaatcggggcttgcgctgttctctcgcctgagcgagaatctgcgtcacagcgagaaatcggcggcttaggtcgccggttcctcaaatggctctccggagggtgatccgcaggaggccgagtccgggtgacccggttgctactcttgttatcaatcgccaactgaaggagagatcccatggcatctgtaaccctggccgaatcggccaaactcgctctcgacgagctggtggctggcgtcatcgaaaacgtcatcaccgtgaaccgcatgttcgaagtcatcccgttcgacggcatctccggtaacgccctggcgtacaaccgcgagaacgtcctcggtaacgtccaggttgctggcgttgacgcgaccatcaccgccaaggcaccggcgaccttcaccaaggtcaccagcgaactgaccaccatcatcggcgacgccgaggtgaacggcctgatccaagccacccgctccagcgacggcaacgaccagaccgctgttcaggttgcgtccaaggcgaagagctgcggtcgtaagtaccaggacatgctgatcaacggcaccggcgcttccgacgagttcgaaggcatcataaacctctgcgccgaaggccagaaggttgccaccggcgacaacggctccgcgctcagcttcgagatcctcgacgagctgatggatctggtcgtcgacaaggacggtcaagtcgactatctgaccatgcacgctcggaccctgcgttcctacaacgcgctcctgcgtagcctgggcggtgcgtcgatcggcgacgtggtcactctgccttcgggcgctgaagttccggcttaccgtggtgtgccgatcttccgtaacgactacatcccgaccaaccagaccaagggcaccggcaccaacaccaccagcatcttcgctggtacgctggacgacggctcccgcacccacggtctggccggtctgaccgccgaggaagctgctggtatccgcgtcgaagacgttggtccggcggaagacaaggacaactacatcactcgcgtgaagtggtactgcggtctggctctcttctccgagaagggcctggcaatggcggacggtatcaccaactaaggtgatgcccgttctccggcagtagtccatccgaaggcgggccaggaaactggctcgcctttttaccatcgaggatagaatcatgaaagtgacacgcgtattcaagacggtcggcccgctggagggtcagaccatcgccctggctgggctccagttcgttgacggctatgctacctatcagggccagcacactgaagccgaccgcctgggcaagttcctccaccgcaactggcaggtcgtcgtagacaccggcgagaaggcccaggagctcactcctccgcccgccccgcctgctcctgaggaagtgcccaacgccaaccagaccctgggcaacacccggctggcggaagctctgatgaagctggatccggagaaggacgaccactggaccaagctggacaagccggcaatgtccgctgtcgagcagatcttcggctctgctgacgtgacccgcgctgacgtggaggctgccatcgcaggcttcgatcgcaacgtggcccgcaagatggctgctgaaaaagcggctgggtaaggagagcgaagatgtccttcaacgtccagaacgacaccggcaccatccaggacgccaacgcctatgtctccgtcgaggagttcaagtcgtttcagagcgaccggggcggcaacatcagcgccttcaccgacgatcagatcgagaaggccatcgttcgcgccacagacttccttgacactcgctactccttcgttggagagcagtggcgactggagcagggcacccaattcccgcgccagctggccgaccgccccttctcgagctacgagaaggatcctcggagcggcctgccccgtgccctgaagcacgctacctgcctgctcgcaatgcgctccctgggcggcgctaagctcctcccggacccgacttacaaccctggtggacaggtgacctccgtgaccaagaaggtgggtccgatcgagacctccaccgacttcgcggaaccgaccccaggtcaggccccggctgcaccacagtacccggacgtcgacctactgctgaagaacgccaagctcctgggctcctcgctcagccgccgcgtcatgagaggctaacatgagtgccttctacgaggaaatggccgccgtcgcggaggagctcctccaggagttcggtcgcgacatcacggtgacccgctacggcccagggaccagcgacttggtgaccggcaaggtggagcgcccgactcagctgagtcagacactccgcgccgccgttctgcccgcctcccagggcaccatccaggcgttcgacgtgcgcttcatggacaacgtcctagcaagcgagaacctccgcttcgcggtcatgtccacggtcggttcaacattcatgccggagccgactgacgaggcccagttcgacggctcgacctgggcggtcctgggctgcaccccgctgaacgtcgacggcaccgccgtcatctacagtgtcggcttccgggaggtctgatgagcttcgagtcccaggtgcgtcgtttcggcaatactaccatggctcgcatcgatcaggtgcgacgagccagcgcacttgagctcttccgcctcatcatcgtcgaaactccggtagacaacggtgtgctccgcaataactggcgcacccaggtcaacagccccaacacagaacggaaggacggagccgacccaacgggagggctggccctgactgaggccgcagccaacttaggcatcttgacggacaccgtgttcttcaccaacaacctaccctacgccgagcgcatcgagtacgacggctggagccggttcaaggctcccgctggtatggtgcgcaagaacgtagtccgctgggatgaaatcgtagccgccaaggctcgggagtacatgtaatgaatcggttcagcaacatccgcagcgccttgctccaaggataccaagactgcggtcttgggctgcccacggcggagcctaacgtgaagtgggacccggtctctgcggagccctgggcatccgtcttcattctacccaaccagcctcgcgtggcctccctgggcgagggtgggatggacgaacacacagggattatgcagatcgacgtgaaccatccttccggcacaggagagttcggcatcacagctgacgccgatacagtggcggactactttacggcaggaaggcgtctcgtctataatgcccaggaagtgatagtccgctcttgtggccgatccccaggtcgaaaggtggatggctggtatagaatcagtctcactatcgactggtatgctcaaacacctcgttcctaaaggagaattgtcatggctaacggctcccgccactcgatgcgactcgttccggaggtcgcctacggcgtcacccccgcgaaccccgcgttcacgcctatccgccacaccggcaccacgctcggcctgtcgaaggaagccctccagtcggaggaaatccgcgacgaccgtcagatcgccgacttccgccacggtgcgttccagaccgctggtgacatcagcgctgaactgagctacggctcgttcgacactatgctggaagctgtgctctgcggcacctgggccaccgacgcacccgctgtcggcaccgaccagctgaaggctggcaccatccgccgttcgttcaccgtcgagcggttcttcggcgacctccaggctgcccagaagccgtaccaccgcttcacgggcgtggagttcaacaccctgggcctcgccatcgctgcgaacgccatggtcaccgccaccttcggcgtgatcggccagaacttcgcgacggacactgcccagctcgctggcgcgacctacagtgctgcctcgaccacctcgcccttggactcgttctccggtacgctgaacgagaacggctcgctgatcgccgtgatcactgagatccagttgaacatcgagaacggcctggaggctcgctacgtcgtgggctcgaaggcttcgatccgcccgtccatcggtcgttcgaatgtctctggcaccatcactgcctacttcgaagactccgtcctgctcgacaagttcgtgaacgaagttgagtctgacatcgagttcacgctgccggacggcgctggcaacgtgctgaagttcaagctcccgcgcatcaagtacaacggcggccagccggatgttcagggcgaaggcccgatcaccctcagcatgcccttccaggctctgctggactccgccactggcaccaacctcatcatcgaacggacgcctgcataatgactgacacgaccaagaagactgggatggaggcgttcttcacgcgctccatcgccaacgaaggcatcgagctgcccctgtacgccccgaccggggagaagaccgagcactggctacgtgtgcgtggtatcgactcggacgagttccgcacagcggaggccaactccaagcgggacgccttccagatcgcctccgtggaggacctgacggagcgcactcgcttgatcgccgaatcccagcgtaagctggtcgccagtctcgtggtcggttggtccttcgagcaggagtgcactctcgagaacgtgatggctttcttccgggaggcccctcagattcaggaggcggttgaccgggcagcgagccgtcgcgcactttttttcgcaggaagatcgagcagctcgccgctttcgccgagcacgagttccgactcgatctgatacccaaggggtcgaagcagacgcttcgggcgagcctccaacaggtctggaagaccttgcgaaggaagcccaggcagctggccgaggcccctgccctgcctgaggaactcaagtatgtgtgggagtggtacagggaagtgttcaccggccagccgctgacgtattcagagctgcaccactggtccagtctgacgggcaagcggctccaaggctgggaggcagaactgattaagtcgttagacaggattttctggaaggtgcagcatgacggatatcgctcggctacagattcgaattgagtccctggaagcccaggtggcgcagcgccgcctggactccctgggcaagagcgccgggggcgctgaacgagcttcctccggtcttatgggcgctttcaagggcctgctcggaccgctcactgcggtggtttcggctaccgcagctctcaacaagttggtcgacgtacaacgccagttcgacgttctcaatgctgggctcgtaaccgccacaggttccgccgagggtgcatctcaggcattcgaggcgctccaggacttcgcagccaacactccgtacgacctcgcccaagtgaccgacggcttcaccaagctcgtgaacctgggcctcacgcccagcgagcgagccctgcagtcctacggcaacaccgcttcggccatgggcaaggacatgatgcagctgatcgaggccgtcgctgacgcctccaccggcgagttcgaacgtctcaaggagttcggcatcaaggccaagcaggagggtgacaaggtcaccttcaccttccgtggcgtcaagacggagatcggcaacaacgcccaggaaatcgaagagtacctgatgcgcctcggcgagaacgagttcgccggttccatggcagctcgaatggacaccctcgacggggcgctctccaacctgggcgacgagtgggacgccctgttccggaacgtctcgtccatgggcgtgggcagcgtcatcgaggacggcgtgcgcctcgctattgatgtgctggctgagctgaacgcgatgctctcttctggcgagatggagggctacctggacgcaattgcaggcaagttctccggcttcggagaggacatacagcagaccgttcagattctaaccaagttcatcaaggacaactttggggagtggtcggacgaaggttccgccgtggtggacttcatcatcgacgccttcaagaacttcccagagaacgtgcgggccttcgtccagatcgcagcggtggagttcgcccaccagctggaactgatgaagtccgacgcgaccctctgggcagactctgtcaaggccatcttcaacgacgacaccctggactccgctgcccagcggcacgcggcacgctaccaggccctggcggaggctcgtctcagttccatcagcgatatcatggcggagcgcgatgcggcactgaagtcgttcgacgatcagatggccgcttcgaagaagctgagagagcagtacgacaaggaccaggaagctcgcagggcacagggcggcgaccggctggctggcttcaaggtcggcggcgatggtggttcctcggcctcctccggggcttcgaaggagcaggagcgtgcggccaagcagcgggagaaggacttccagaatctggtggcctccctacggaccgaggaggaggccatagctgagtcctacgcaaagcgcagggcaatcattgaggccaataccccagacggctctgcgcagcgagcggacctcctagcgcggctcgaccaggaccactctgcccagctcgccaagctccaggagcagcagaactccgaggtggagagtctgcgttctcagctgatgaccgaagaggaagccatcgctgagtcctaccagaagcgcatggagatcatcgcgcaagccaagaacctggagtcggctcagcgcaccgagatggaagctcgggtcgctgaagagcgggacaaggctctggccaacatcgaagcccagcggcagcaggagcgggattcgctctacaacagcctcctcaccgaggaggagatgctgattcaggcatatgatcgcaagaagcagttgatccttgacagcgaagcggtcaccgaggttgagcgccaggatcttctccgccgactgaagcaacagttcgacgaggagcaggcccaggcggagagcaagcggcttcagacccagctgaacggagcggctcagctgttcgacggcatggctggactcgcgaaggcttacggtggtgagcagtcgaaggcttacaaggctctcttcgccgtaagcaaggcgttctccatcgcccaggctgcaatgtccatttccaccggccttgctaaggcccaggagctgggctggcccgccaacctcgctgagatggcacgggtcgcggcgactggggccggcatcgtctcccagatccaggggtcgaacttctcgggtgcatacgaccagggcggccagatccctgccggcaagttcggcatcgtaggagagtacggccctgaaatagttcgtggcccggcctctgtcactgggcgagttgccacggagcggatgatgcgcgaaacttccggggaaagtgctcaggcctctcctcccgtggtgaacgtccgcaacatcaacgtgatggatccgtccgtcgtgggcgattacctcggcacggacgacggcgagcaaatgatcatgaacgtggtgcagcgtaaccaagctgtcctcggtcgataaggagctgacatggcgttcgaagtaggcacagcggccaacatggaggacttcttcacgaagatcctcaacttcctgaccaccagccccgcgctggcggaggccaaccaacagtgggaggttctggaagtctaccgcgacaacctggaatctctggcgattaacttcaccgaggttgacagttccgtcgctggtggtaagcgacccatccacggcatgcgacgtgacaatcgcaccctgggcagcgacaacccgaccagcgcgaactccattggggcggtccagggtgggggcgtcgtggccggaacttcccacatgaccatgaagttgagggtggcgaaggagatcacgagtgtccggctgagaagcccatacagctccgctgtgagcaccatgatctcaaacttccgacttcagtattctgacgatggtgcaacctggaccaccgctctcactgtaagctcgaacccgacctacgccatgggtgagcagaagagcttcaacgtgccagtcgcaacaggcccccgcctttactggaggctccgcattgacagcctgcagaatggatccactactgccaccaccgcctactgggacagcgtgttgctgatgaccgcctctggcgagattgccaaccacttcggcagtgaatgtgtgctgaaggcgagaggcaacgcgggggccgatgccatctacaccggcctcgctaccgagtatgacagcgctgctgggtggtataatctcttcatcaatggttacaccggctacgacccgaacgtgacctcctggttcgagcagcccggcgctctgcccagctaccgcaatcagcagggcggctatacgctggcagtgccgatggtgccactgtggaacgatcagatgccgtactggttcgcagcctctgggcgatccttccggttcggtgtcaaggtttcgacccagtacgagggaggctacatggggttcatcctcccgtacgccacccctggacaatatccgtacccactggccatcggcggttctctggtccccacctcgggttctcgctccgacgtatggcgttattcgttcaatagctttcgccacagcgtgttcgtctgccctgggtgtgggggcgacccggacgctagtgccgagagcgtggacactacactataccttcgattgccggacggcacctggggcttcgtcgggcagagatatacccgctccggctcggatccgaatgccatcatagcatccggttactccggtggcacagcccccaccttcagcgggcctcgccgaggcatgtggcctttgtcgacgcggcaccatggaaacactgccggctttgcccgaagagactacagggagattatgggaggaggctacctcactcaaccgctcatcatccatcagcgattgccgttcgctgcggtctggggcgaactcgaaggagtatatcagatctccgggttcagcaacgcagctgagaacactgcagtggtgggtgggaagaaccacatcattctccagaacgtggctcgtactgaagtccacgaatactggtctctcgaactgagctaaggggctgtcatgggatatcaaactggggttgctagcggcgtcaacgatctgctggacaagattcgactgttcgccatcgaccagggctggactgtcaaccgctggagcacacacacctacgggcgagagctgtgtgtccagaagggcacggccttcttcaacatgcgctcctatgagcagggtcagagcgtcctggtcaacggaagctcttccggcacagcagccaatcctaagtatggcatcgtcctgaccggatccgatggctactcgggaggcgcagcctgggaccttcaacctgggtatccccggcgttccgccgacgcgtcgcaggcagcccatgccttcctgccgcttgtcaccaacttcggcccgtttccgacctaccacttgttggcgccggacgacaagtgtatctacctggagctggaagtcacgaccggcgtgttccagcgccttggcttcggatcgctggacctcttcaaccccgctgtcgcaggcggtggccgattcttctactccacgcggaacgaccatgtaacgaactcgaccgcttcgaacacgtggctgggcagtgatattgacaacggcaacttcgctggcgaagaagtgcccttcaggtcggcccagttcgcgtccacgatgaactccgcctcttacgttcgatgctccttcggggcattcgacgggtgggcaggttccgctcgctggccatcttacacgcagacaagccagtgctgccagggtgggttcacccacgatggcctgctggctgagctgggctctaacccgctgaacggcatcgcgatgctgacccccaacgtggtctctgtccagattgggggtgagttcctcagcccgctgggagttgtgccgggcatgcgctacatggacatgacgaagtatcttccaggtgacgagttcaccctgggcagcgacacctggaaggtgtttccttggtatcaaaagggtggtcgttcttggcagcgcggtatcgcacacaagaaggtgatctgaaatggctgaggtcgtgatcctcgggaagtatcccgtcctctacggcgcacgccccgttccggggcagcaggagggggcagacggcgtgttctacgaggacggcagcccgccgtacctcgacaacgtgctcgccccgtctgcagcctctaggggcgtcgtaaccagcaacctacccatcggcgaggtggaaaaccgggtagcggcccagcggaggccaaccttcctggacgacttctacaaccgcatccacatacagccctcccggttggagctgggcaacctcctgtccacccaggttcgtcaggtggaggtgtggagcgcctacttggagccacagctgctgaacgccgtgacccaggtgggcacggatggcattcagctgactcagccgcaggcagccccaacctacttcgctgcgctcgagaccagagtttacgtgctgaacatcagcaccaacgggtcgccggtgatcgacgccacgtacaccttcgacttccagggcgaaaacccgacgctgcgcatcactggtcgaagagtggtggtgtggccgttcatgccccagaccaagcaccgcgaaggtcttgaatggaaaaccgacatcatcccgagcttcaagaacgagcagcgtctcgcgctgcgagcggccccgcgacagacgttctcgttcgacttccagcttgataaccaccagttcagccgtgccaaggccatcgccacccagtgggcccaccgggtctacggcatcccggtctggtccgagctgacccgcctgggcgctctccccatgggcacgtctgagcttcaactcgacacgacccaggcggactatcgggccgacgatctagtcatactctgggagagcgacagcaagtgggtcgcggtggaaacgactactgtcacgccgacttcggtcgctctcaagctcccactcgagtccagcttcatgaacgcctacgtggccccgctccggttcgctcgcactccaggggggatggagttccggcgctccagcaacgatattgccacggccaaggccacgttcctggtgacggtgaacaaagacctcggaggctccggttcctggccgacctaccgtggtaaggatgtcatgctggagcgacctgtgcttgtcggagacctgacggaaaggctcgtccggagcacagatgagttcgacaacggttccggccctgtgattgtagacatccagaacgactgggtgactagcaccaagatggtcacgttcgacaccctgacccgagccgaccgctgggctgttcgccgctggatccactctcgtcgtggccgtcagaaggcgttctggctgccgagctggaacccggacttgatcatggtcgagaaccaaggtgcccagagcacagcgctggctgtccgcccgatcagctatcctctatactacggcatcaaggacatcatggtccagctgaacgacggcagaaggttcttccgccgagttctgaacgcctcggtggatccccagggcaacgagattctgaacctggacgagtcgtttggcaccgccttcacaatcggcgaagtggcgttcatctgcttcatgtcccatgtccgctttaacgctgacaagatcgatgtatcccacgccagtgctggtcgggccacgatctctatcccagtaacggagacgcctgaatgagctattccgaatttgaagactcgctcgatcgggggacgccggtcgagctctacgagttcacgcagggtctcagccggtggtactacgccagcggagaggagcaggtcatccgcctgggccaggtctacaagcccatgccgctggtccgggatcggatcaagcagacccaggacaccttcaaggatagccttcgcctcaccttcccacgggacgatgagttcgcctcccagttcctaggcttcgcgccggaggaagtcacgacagtctcagtcctccgtgggcactacggcgacgccgctgcagagttcatgacttactggaagggtcgggtggtcggagccaaggccagcgggaacactgtcaacatcgattgcgagtcagtgttcacctcgatcaagcgccctgggcttcgcgccaagttcgagtacggctgccgccgcaccctgtacgccaggggctgcaacgtgaaccgcgaggcttaccggctcgacggcgaggtgatatccatcgctggtgggctccgtgtcggggtggcgggctccgcgaacaagggggacggctacttcacgggtggtatgctaatcgctcctagcggtgcctcgcggttcctgacagcccactcaggggatatcgtcactcttgcgaggcccctgcccgagctcgtgggtgggatggtcgtcaagatctaccctgggtgcgaccacctcatgggcacttgccagggcaagttcaacaacctggataacttcggagggttcccttgggtcccgacgagaaatccgttcgacggcagctcaatcgtctgaggagttcaccatgggctgggtagcactagtcatcgcagtcatcgccatcgttgtggcctacgtcatggctcccaagccggagagcaggcccccggcagggctcagcgagttccaactgccaaccgcagaggtaggtcgagagatccctgttctgttcggcaccagaattatcgaaggtcctaacgtagtgtggtacggccacctcaaggccgtgcccgtcaagaagaagggtggcaagaagtgacagatcaggttatagtccgcatggagcactgccgccagctgcgctactgcgcaaggggagtgcgagaactgttcctccgctgtgggttggattactccgactttctggcgaacggcatacctgccgagaagctcctggaggcttctaacaacgacgcgatggtccaggacgtggtggaggtggctcgtgggtagtagcagcagcaaggcacaaacagtcggctacaagtaccacctcggcatccacatgattctgtgtcacggcccaattgatgctatcacacgcgtcgacgttgatggcaaggtcgcgtggacgggcaaggccaccagccgcatctcgatcaacaagccagacttgttcggcggcgaagagcgagagggcggggtaagcggggaagtcgacgtcgcgctcggggctgtttcccaggggcggaacgactacctacagggtcgacttggatctgccatacctgcgttccgtggagtggtgggcgcaatcctgcgccagtgctacgtagggatgaacccatacatcaaacgatgggccttctggggccagcgcatcctggttcgccaggacggcattccccagtggtacatagcaaaggctgccatcggccaggacatgaacccggcccacatcatccgcgagtgcctgaccgaccctgactggggcatgggctacccggaggaggacatcgacgaggacaccttccgcgctgcggcggaccagctcttctccgagggcatgggtatgtcactgctgtgggaccgctcaatggagctcaaggacttcattcaggaagttctcaagcacatccacggctcagtattcgtagatcgcagctccggcaagttcaagctgaaactagctcggggtggatacaacatcgacactctccttgtgctcgacgagagctccattgagagagtctccgacttcaagcgcaacaccgttggggagctgacgaactctatcaccgttgtgtactgggacgcctccacagggcagcagggttcggtcaccgtccaggacatcgcgctcgcggcccagcagcaggccaccgttgggaccaccatgcagtacaccgggttcaccaacggcgccatcgcgaccagggtggcggcccgcgacctgaaggccctctcgacgcctctggcgggcgctacgatatacgccacccgcaaggccgcagggctcaacatcggtgatctgttcgtgttcagctggccccggttcggcgttgagaagatggtgatgcgggtttccaacgtagagctgggcaccctgggcagcaacatcgtcaagatcaccgctgcggaggacgtgtttgccctctccgaagccatctacgcgcctccacctccgagcggttggactcctccacactcggcacctgccccggtgccctaccagatcgtaatggaggctccgtactgggagctggtgcagcgcatcggggagacaaacgcccagggcatcagcgctgacaccggctacattgttactacgggcacacggcctgtcggggatgccatcaacagccgcatcttctccagtacgagcgccaatagcgggtacgagcagggaggcaccgccgacttctgcccttccgccttgctgggcgtggcgatcggcgagactgagacggttctttcgctgacctctggggaagatctctcacaggtcgctgtggacagttacgttgctctcaacaacgagatcatgtcagtggtgtcgatcacggacacgacgatgactgtcaagcgtgggctcctcgacaccatccctcagtcgcacgcggccaactcccgtttcttcttctacgatgacttctgcgagacggacacgttcgagtatgcagtcggggagaccgcctatgtgaagctgtgcccagtcacgggccagggtacgctggagctggcctccgctccagcccgctccacgctcatccaggggcgagcagcgcggccctacccaccggggagggtgcggctcaacacggttgcctaccccacctctctgagcggccagctgagcatcacctgggcacaccgcagccgtacccagcagaccaccggcgcaatcatcgaccaggactacgcaagcatcggcccagaggacaagacccgctatggactgcggttcctgaacgcctcgaacaactcagtgctggcggagaagactgacgtctccgggaccgaagccactgctgttctcaactttactggcaacgtcacgatggagctatactctatcaccgacaatggcccgagcctcatgcggcaccggcgaaccttcgcctacaccccgccagcaggaacgacagccagcacaatcaccgctgggacctacgtcccggatagcatcatctttgacggcggaggcgcgtaaatggctgacatagtcatcccccagcggttcgcccagaagcgggacaccacgaccaactggacggccaagaaccccattctgtggagcggggagatcggtctcaccatcgaccctgggcaggccatacgcctgaagatcggcgacgggaccaccaagtggtcagacctcccctacttcgccagcaacggcaaggaagtcgagctccagaagaccgccacccatatccagtggaggctgaagggcgacaccgcctggatcgacctcgtgcctctttcggaactgaagggagagaagggcgacactggagccagcgcctacacactcgccatgagcgacggcttcgtcggaaccctaaccgagtggctggcctcgctgaagggtgagaagggcgacactggagcccccggtattgcataccagaagcgcatcctggttgttcctgacaccaactcagggacgcttgcttgcgactggggtgcctacgatgaaatccgagtgacgctcacggcgaacgtcgctcttagcttctcgggcgctctcgacgggcaggcatgtctgatcaagatgcgtcaagactccactggcggcagggtagtttctctgccagcgggcgtgcggttcaactcgttgattacttcgtacgcagtttccacggctccgggtaaggctgacaagatcggcttcatctacgacggggaagactccaagtacgacttggtctcgatcatccctgggctatagtatgggctacgtaccggaagaggaagcgaacttcagtggggagtcttacgaggccccttcgggttcggttgctgtgttcagcttcggcgacctaaacagcgccgagtttctgttcccagggaccggctacctgccgcccagcggcagctccgccagcttcctcttcctggctggtgaggatccaggaggcgaaccacagccggacaccggcccactcagggccaactttatgattctactagctatgtgaggcaaccatgaccgttcgagtttacaagtccaccgacaccgacgctccccagatcctgggctcccgcgccggtgatcttatcaatctcctcgacaagtgccttgtcacgggctatggctccaagctgcccgctgggtggaccaagccctttgttggtacgaacctcgctgcgttcaagcagggggccgggagcaacggcatgtacctccgggtcgacgacacttctacggcggccaccagccgcatggcgaaggtgaagggcttcacctccatgacggacgtgaacacggggctggggcagttccccactgagagtcagtacgccggaggcctgaactggatgctgttccagagtgggacggcctccttcgcccgcaactggatcctcgttgccgacgagaagctgttctatctctccatcgagacggcaccggaaaacagctccacccaaagctcggactactatcgcgagttcatgtacttcggagatatcaacaagtacggcactacagacgaatcggctactgttctgtgggggcatcagaacaccacgttcaacacgtctcacaacgtgccgttcgattcttcgactctcaacgccagctaccctggcctattcctggcacgttcgttcagcaacctgggaggttctttgccggctggccagcaccatgactactacaagtctggcgccagcagcatctggggagctgtcggttcctatctgtcgtacccgcacggcccagacggtgggcttatcttctcccctgtctgggttcatgagccggggaccgcaggtggagcccatatccgaggcaccttgccaggggtctgggctcctctccagaacgtcttcgcacacggggacacgtttgagggccagggagagctcgcagggagaaccttcctggtgtttaagcaccaccaatgccgatgcgccttggagatcagcgacacctggaggtaaccatggcagacctcggaccaatcaacgttaccatcggagccagggtcgctgttcacgaccccggcactgtctcgttcgtacgctctggcctgacggtgatcgccattgcgcgatctccgacggctgggactcccccaacgatggtctacgagaggccggtggacatgcccgaccacccgctgtggtgggagccccaggcagggtcaggtcgcaagtatgcttggtactctgtgcgcggctacgtcaggcagctggccaaccagcaggaggttcctgtcaagaacgcgagggtgcgcctctaccttcgctccacaggagttatggttggcacggccattacggcggaggatggttcttacgagttccagcggctcatgtatgattcctctgcgtactatgcaatcgcactggacccggacggggagcctctccagaactccttaattcttgacaggctcacgccagtactgacatagccctccgtcaggagtcatgtaagatgactccccagatcatttcgctttctggggagtcagcttatggccgacaacgaacaagcagtagccgtcgagctggcgcaactgagagaacaagtgaagaccgtcggggagaacgtctccgaaatcaaggccactatggccgctctcatttcgctcgacaagaccattgctgagctcgcaatctattcaaagcagacccaggacaacgtccgcctcctgtgggagcggttcgaagagtccaagcagtggcagcaggcccacgagcgcgagctccacgaagtccgcaagatcagccacgacgccctggacaacgtccgggacgaggtccacaaggaaatcctcaccactgaccgcaaggtcgaagcctggaccaaccgcgtgcgcggtgcctcctgggccgctggcatcatcatgggcgtcgtccaggtcgctgtgttcgcctccattggctggaccttcaccaacgtgacgagcctccgcgagtcctcccaggtggacacgctgcggatcgaccggctggaggaacgcgcccagaagcgcgacgccgaggagcgacgaccccggcactgtctcgttcgtacgctctggcctgacggtgatcgccattgcgcgatctccgacggctgggactcccccaacgatggtctacgagaggccggtggacatgcccgaccacccgctgtggtgggagccccaggcagggtcaggtcgcaagtatgcttggtactctgtgcgcggctacgtcaggcagctggccaaccagcaggaggttcctgtcaagaacgcgagggtgcgcctctaccttcgctccacaggagttatggttggcacggccattacggcggaggatggttcttacgagttccagcggctcatgtatgattcctctgcgtactatgcaatcgcactggacccggacggggagcctctccagaactccttaattcttgacaggctcacgccagtactgacatagccctccgtcaggagtcatgtaagatgactccccagatcatttcgctttctggggagtcagcttatggccgacaacgaacaagcagtagccgtcgagctggcgcaactgagagaacaagtgaagaccgtcggggagaacgtctccgaaatcaaggccactatggccgctctcatttcgctcgacaagaccattgctgagctcgcaatctattcaaagcagacccaggacaacgtccgcctcctgtgggagcggttcgaagagtccaagcagtggcagcaggcccacgagcgcgagctccacgaagtccgcaagatcagccacgacgccctggacaacgtccgggacgaggtccacaaggaaatcctcaccactgaccgcaaggtcgaagcctggaccaaccgcgtgcgcggtgcctcctgggccgctggcatcatcatgggcgtcgtccaggtcgctgtgttcgcctccattggctggaccttcaccaacgtgacgagcctccgcgagtcctcccaggtggacacgctgcggatcgaccggctggaggaacgcgcccagaagcgcgacgccgaggagcgcgagcaggacatccgtctcagggcgctccagcagcagcccgcaaccatcattgaccggaggtaacaccgatgtctaagttcatcctggggcaccgctccgtccagcgactgctgaccgtccacccagacctcgttcgcgtggtccaccgggccatcgaactgactgaggtcgactttaccgtcctcgagaccctgcgcaccgtagagcgccagcgcgagctggtgaaggctggggccagccagacgatgaacagccgccacctccccggcaaggatggcctctcccgtgcggtcgacctgggcgcttacgtcgctggtgaggtccgctgggactggccgctctaccacaaaatcgctgcagcgatgaagcaggccgcgaaggagtgcaacgtcccgatcgagtggggcggtgactggaagtccttcaaggacggcccgcacttccagctgccacacaaggagtacccggcatgaaccctctcctgatcggcccggtgttcgagctgggctccaagctcatcgacaagatgttcccggacaaggagaagcaggccgcagaacgcgcccaggcggagctagcactgctcaaggcgcagcaggacggtacgttccgggaaaccgcccagcagctctctgcaatcctcgcggaggcccagtcggcggacccctggaccagccgcgcccgacccagcttcttgtacgttatgtacgtgatgctgctggccgccatccccatgggcttcctctccgcgttcaacccggcgatggccgaggcggtggccaacggcatgaagatgtggctgtccgccatcccggaggagctgtacacgctgttcggcgtcggctaccttgggtacgctggtgcacgcacctgggaaaagcgaaagggttcggcccggtagcggcttgggttgcttgggttgcgctagtggccttgctttttctaaagtcaccgcaaccccgcatgcccacagggtcctaggcccccgactctagttactctactttctttagagagaaagaggagtaagaaaatagccttcccgaggcggctatcccagccctgggcctcaaaagcctagcgacttgcaaagcacccgagtaacccgagtaacccgagccagccctgtgctggcgcgggtcctagctgtcttggggttgcctcccaacccgagtcgggcggagcaacccaagtcgggtgcaaggtgattgcgcctgggcgacagcgccacaataattcgccttggcccttagaaaaggaggacgaacatgcgtccctatgaaccgaaaacaaaacccttcaagcaccaagctgaagagttcgagcgaagcaaggacgccccagcccgcgccatcttctgggagcagggcaccggcaagagcaagatcaccatcgacaccgctggtcacctctacgcttcggggcagatcgactgcgtcgtcgtggtcgccccctccggcgtgcacctgaactgggtgaccgacgaaatcccaacccacatgcccgactggattcgagagcagatgttcgctcacgtctacgctggagacaaggccggtacgaagtaccaccaagcccagtgtcagcagctggtcgagcacaagggcttggccttcctggccatcacgtacgactcgctggtgaccgagcgtgcgaaggagctcctctgggcactgctccagcgacgcaaggtgctctacgtcgccgacgagagccagcgcatcaagacgcccaaggcaacccggaccaaggtggctgtcgcctccgccaagttcgcagccttccgccgggtgctgtccggcaccccggtgacccagggtccgttcgacgtgtacagccaagtgctgttcctggacgaagacttctggaagcgcgaggagatgtccccgttcaccgtcttcaagaaccacttcggcgtgtggcgcaagcaggccaccgacactgggcggaagtacgatgtccttgtcaagtaccgccgcctgaacgacctgaacgccctgctggagcagatcagctcccgcgtgacgaaggaggacgtgctcgacctgccgccgaagctgtacagccgccgctacttcgccatgaccaccgagcagcgccggatctacgagtcaatcaaggaggagttcatggcgatcatgctctccgaaggagactgccggaactgcggtggaactgggcgcgtcgagtacgaaggcttcgccggggagtgcccaacctgcgaagggaccggcaagcgcctgggtggcatggtaactgccccgctggccattgtccgcctcctgcgtcttcagcagactctgtgcggctacgtgccggtcgaaaccttcgaggaaggtaaggagcccgagctgacgatgctgcccggtgggaacccgcgccttgccctcctgggcgagatagtggaggatcttccccatcagttcatcgtgttcgcccgcttccggaaggacatcgacctgatcatggacctcatgaaggagctgaagatcgaggctgtgcgctacgatggggctctggacgttgacgcccgcgccgcctcgaagaaggcgttccaggacggcaaggcccaggcgttcgtggctaacccagctgtggcggctgaagggctgacgctcgtcggggcgaagaccgttgtatactacaacaacagcttcaagctcgcggagcgactgcagtccgaagaccgggctcaccgtattggccaggatcaggctgtgaactacatcgacctagcgtgcccagggaccgtcgacatggcggtcatagatgcgctgaagaataagcttgacatcgccagtcagattactggcgatcgactgaaggagtggctctatgagtagccaacagaagaagggccgcgtgttcgtggtccagaagacaatgcgatgggacagcaccaagggtgaactggtccctaagttcgacgtgagcccggcccaggagtatggcgagatcgtctacctgctgagccccacagcctcgccgttccgccccgacagcctcctgggcgaactccacgagaagctgaaggacttcaccccggacgactacctgctgctgatcggcagcccggtcatcatcgggctagcggttgccatcgctgccgactataccgacggcgaggtcaaggttctccagtggagcggcaaggcgggcaagtatctcccaatcgaggttcgcggcctctttaatgattgcgggccggtttagtcttcaacagacttcatcttgcaatgtaacggcggcgatccgccacgaactggaagagaaaacatgagccaagacaacgacgcactggcatacgcccagtacaccgacagcaccgctacctcggagaacgccctggcggagctctcccgcctcgctgacgagcaggcccaggccgctgcccaggtcgccgacctggaagcccagctggacaaggcccgcgaccgcttccgcgacatcagcgagcgcatcatccccgagaagatggacgagctcggcatggaagagttcaagacccgcaccggcctgaagatcaagatcaaggaagccatccgcgcctcgatcccgaaggcccggcagggcgaagccttccgctggctccgtgacaacggctatgctggcctgatcaagcgcaacgtcgccatcaagttcggcaagggcgaagacgagaccgccgaagagctggccaagcagctcagcgagaagttcgaggtggaagacaacacctctgtccacccgtccaccctgaaggcgttcgtcaacgagcagctctccaacggcgtcgagatcccgatggacctgtttggtgtccaccgccagcgagtttcggtcatcgcctaacctgggcgaccgaccacagaatcccgtcacctgggcagtggtgagcttgtcggcagactgacgtctatcgcaccgggggacgctaaaccgcctgctgcttactatgtaacaaggagccaaccatggctaacgaaaaagctgtcgcagaagccaagtccaacctgcccgtcgtccacgactacggcgactatgccggtgccggcttcgagaatcaggatcgttccgattactcgattccgttcctggcggtcctccagggcctgagccccgagctcgagactctggaaagcgccaagcctgggttcatcctgaacaaggtcacccaggacgttgtgtcgggcaaggacggcatcgtcttcgttccgtgctacacccagcacgtgtacgtcgagtgggtgccgcgtgacgctggtggcggcatcgtcggtatgcacgaactcgactcggaagtggttgcccaggctcgcgccgcagcccgcaccggcaagttcaccatgccgaacggcaacgagctgatcgaaaccttctacgtctatggtatcgtggtcggcgaagacgaaacgacctctcacgcggtcatcgccttcacctcgaccaagatcaagaagtacaaggcgtggatgacgaaggctcgcaccgtccagatgcgcctgcccgacggtcgtaagatcaacccgccgctgttcgcccaccgctaccgcctgaagacggtaaaggagaagaacgccaagggtgagttctacaactgggacgtcagcttcgacggcgcaactgccgaagcctgccgtctggctccagccgactccgtgttccaggaagcggcccagtgcatggaactggtgaagtccggtcaggcgaaggctgacctctccaccgaaggccgtgaccccgatgaagcaatggcagccgaggcggaagccgaaactgctggcgctccgaagggcggcaaggccccgttctaacgaacggcggtctacgaagcgggagggtgacctcccgcttttcacatgagaaaaggagccaccatggacttcgcgccacagcaggaccaagccctccgggcgatcgactactggttcaagaaccgtacgaaagaacaaccaatcttccgcctgttcgggttcgccggaacgggcaaaaccacattggcgaagcacatagccgccaatatcgacggtctggtcatcttcgcagccttcacgggcaaggccacccacgtcctcaagatgaagggctgtccggtcacctcgaccatccaccaactgatctatgcaccgcgtgagaagggtcaggcccggctccgcgacctccagtcgcagctggttcgcgagaagacgaagaaggacgccagtccgaagcgcgtcaaggagctggaggagttgatcgccgcagagcaggcgaacctccgccgcccctcctggaccctgaagtccgagtccgagctgcgcaaggcgaagctcctcattgtagacgaagcgtccatggtcgaccagcccatgggagaagacctcctgtcgttcggtgtcccgatcctcgccttgggcgaccctgggcagctggcccccatcaagggcaccggcttcttcaccaacgtgaaggccgacttcctcctgaccgacatccaccgccaagcccgcgacaaccccatcattgagatgtcacgtattgtccgggagggagggttcctccgccttggccagtacggctcgagcgaggtcgtcgacggtcgccagttccagcgcgactgggtgttctccgctgaccagatcctggtcgggaagaacgacacccggaagagctacaacgcacgaatccgggaactgtccggagcggctgagccgctaccgtccctgggcgacaagctggtctgcctccgcaacaaccacgacgtagggctgctcaacggctccctctggcgcgtggacggcccagccctggacactggggacgggcaggtctacctggagctcctaggtgaggaggggcagcggattgtgacttcggcccacgcgtgctacttccacggcggagagccggaatggtacgagaagaaggaagccgacgaatttgactatggatacgcgctgacggttcacaagtcccagggttcgcagtgggacaaggttctggtcatcgacgaatggaagcgacaggaccacaagcagtggctctatacggcaatcacgagagccgcagagtccgtccgtgtcgtaaagatgtaatgccggcaaggccccgtgggtataaacttgaccgctccaaccctgttttagaggattcctcatgaacgaaccaaccgacaaggagacttcgccggaaggcgaaggtagactataccttagtcagatcgaaacaccaactgattcttacgtcacccgctacccgaaggccgttgaaatggccatccagcagcaggacatcttctggcccgccgaggaactcggtgtcgaggaggatgaaggcgacttccgaaccaagctgaccgagggcgagctgcacggcatcctcaccgcccagtcgatcctcacccagtacgagctgatgatcggcggcgacgagttctggggtggcaccatctcccgcatgttcccgcgccctgagattcagcgcatgtgcgcctgcttctcgcacgtcgagctgggcagccacgccccgttctacgccctgggcaacgaggttctgggcaaggccaccgacgagttctacactgagtggaagcgcgacccggtactggctcagcgaatcaagttcatcagtcagaaggctgcctccgaagacgctctagaagtgacagccgccctggccttcttcgagggtgccgtgctgttcgcgaacttcgcctacttcaaggcgttcaacagccgaggcttcaacatgatcccacacttcgtggccgggatcgacggcagcgccaaggacgagaacttccactccctcgcctccagctggctcttccgccagtgcaaggccgagcgtgtgcagctgggcaaccactcggtcgagcaagagcaacggctggcggactacatcctgcgcatggcccaggacgtgtacgagcacgagctgcgcatcgtcgacatgatcttcgagaagggtggcatccgggtcatcacgaaggaagagatgattcagttcatccgcaaccgcgtcgacgtggtcctggtctacctgggctacccagcgctgttcggcgacgagaagggcgtggtctccggctggttctaccagcagttgtcgacgttcaagttcagcgacttcttcgctgccacccaactccagtacactcgcaactgggccaagcacaaactgaccttccggaaggagctcgcaaatggcgtttgagatcacgggtggcgttgacgaatccaccatccaacaattcgagctgctcagcgccgagcgcaagcggctccaggccctcgggctgctgccagaatggtacacgactcagggttggcagatgttcaagcagaagtacgcggtcgaaggcgaagaggcggtctacggtcgccatcggaccatcgcccgaaccctggcccgccacctccgtggtcgcgaggacgagtgggaggagaagttcttcaacctcctgtggaacggcatcctgtcgcccgccagcccagccttgggcaacacgggcaccgaccggggcatggtcgtctcctgctctgggcaggtggtcggcgacagtgtggacgagttctacagcgccctgcgcgagaccgcattgctgtccaagtggggcttcggcacctctgcagacttcagcggcatccgcccacgaggagccaagatctccactggtggtctggccaacggagctgtggaagtgatggaagacttcttcaccacaactggcaagatctctcagggcggcaagcgccggggctccatcggtgcctacctggacatcgagcacgacgactgggacgaggccgtcgacggtctggtcagcgagcccaacgggaagaactacggctggatcgtgcgtgactccttcgtggagaagctgaagaacgacgacccggaagccaaccgccgcttcaccaaggctctgcacgccaagctggtgaccggcaagggctatatcttctgcatcgacaaggcaaaccgccaccgtccggcgatgtacaagaagtggggcctggacatcaaggcgtcgaacctgtgcaccgagatcatgctccactcgagcccggagttcacctacagctgcatcctctcctcgctgaacctgattcactgggaccgcatcaagaactcggacgcggccttcgtcgccaccgtgttcctggactgcctgtgccaggagttcatcgagaagagcgccggtatccctgggctcgagaaggttcgcgagttcacgatcaagggccgcgccatcggcctgggcatcatgggcttccatacctacctccagcaggagcgcatcccgtacatcggcctggaggcccagttcctgtccaatgagatctccaagcacctccacgacgagagcctccgcgcctcccagtggttggcccaggagtacggcgagccggagtggtgcgaaggcttcggggtgcgtaacacccatcgcacagcctacgctccgacgaagtccaccgcgctgctcatgggcggtgtctccgagtcctggtcgcccgatccgggcatgatcttcgacgcaggctccgccgtgggcgagctccgccgcatccctccggtcatctatgaactgatgaaggagcgcggggtctacagcgaggccacgatccaggacatcatcgaccacttgggctccgtccagcatgtcgactggctgagcgccgaagagaagctggtcttcttgaacgccttcgagatggaccagcggatcatcctccgtcacgcctcccagcgccagaagtggacctgccaggggcagtcgctgaacttcttcgttccggaagacggcagcgaagacctcatcgccgagctcatgacccgcgtgctgctcgacgaagagatcctgtctcagtactacatctacagccgctccggggtggttgtcaaggatgagtgcgtggcctgcgctgcctaaggccaagccccggtcttcgggccggggcaatttattttgccaaaggggcttgctttctgtcttcgccgaggcataatggcgtcactgggtcgctactgacctaaaccagaaaaggagaagcgccatgaaatccatccagatcgaaaccacccaagtatccaagttcgaagacctgagcgccgtgtcgaccgctggcctcctggccttctacaacgccgagaccggcaagaatacctcgaagtttgcctcccgtgccaagggcctgatgcaggtctgggctctggtcgaaggcaagctggccgcccaggaggccaacccgcacgctgcttcgaataagctcatcggcgagttcctggcccgcgaggaggccgctgcagccccggcccctgaggttgcccccgcccccgcccccgccctggaagaggctcctagcgccgctccggcagccgagaaggctcccaaagagcgcaaggcacgcggcttccgcttcaagttcatgaagcgtgacgaaatcaagaaggtcaaggaaggctcgaagcgtgccgtactcctggacctgctgaagcgcgagggcggtgcaaccttcgaagagtgcatggccgccaccggctggaaccgcaaggactgctacgaaggcatccgcctgctgcactactacgttggctacggcctgaaccaggacgagaagaccggcaagatctgggtcgtcgcctaagttcccacctggagggctccggccctcctctcaaccctgaaaaggagcaacaccgtgtcaagaacctacgaacgcctccccatcgaagtcttcggagcgcacctgctctccaccgtcgacctcgacccgatctacctcgccctccgcaagatggagatgtcggaagcccagatgcaccgctggctgctggcctactggtgctgctaccacgctggcgtggcatcctacctctccgagttcgaaggcaacgacttcttcgaggctctcatggtcgccgccgtgaacgagcagccgactcccctgggcgaccgctggccccgtggtggtgaacgtcgccactggcgtggtgcccaggccaccagctgcgtcgagtcgctggtcaagcgttacggcaacaacgctgaaggcatggccgagtactgcgcgggcaatggcggcaccttccaggaggtcaccaagcgcgtccaggagcaccggctcttcggcccgtggatcgggttcaaggtcgctgacatggtcgaccgcgtcctgggcctcccggtcaccttcgacaacgctgcggtgttcatgttcaaagacccgtacaaggccgcgacgattcagtacgaggtgaaccccaacatcccgacgaaggtctacccggacggctccgaggccccgcgtgaccgcgagctggtgaccccggacgtagtccaccacgtggccgagcacctgatcaagcacttcagcggcttcaacgctccgccgctcggcgaccgccctgtgaacatccaggaggttgagacgatcctgtgcaagtggaagtcgcacatgaacggccactaccctctgttcaacgacatcaccgagatccgtcatggtgcagcgccctgggcagcccactccaagacggcccaggcattcttgaacgccatgccggaggcatccaagtgaaagaagtagtcatcatcggaggaggcctgttcggctccatcgccgcagccgccctgcggaaggacggccacgaagtgaccgtcatcgacgcccagaaggagggtgctggctccaagcctgccgcctgcctcatgaagccgagctggttcagctccatgggcaaggagaagttcggcccgtccctggaactactggacagcctgtatggtgtacaagacctgagccttcgcgtcggaccgctgcactccaccgtgcactggtgcgacccggcccagatcctccagcctgcggacctgtacgacgaggtcgaggcgatccagtacaacgtcggtggcccattcatcctggtgatgaagagcggcctgttcatcgaagccaagaccgtcatcgtcgcggctggcgtctggtccggtgtgctggcccacgtccctgggctggtggggcgtgccggggtggcgttccgctggagagacatgcagctgactgaagggttcgtaaagccctgggcaccgtatcgccagactgtgggcttcaacatcagcccgaacgaggtgtgggttggcgacggctccgccatcaagcccagcaactggaacgccgagcgcgaggcccagagctacgctcgcagcgcctcggccatcggtcgggaaggctacggcgacctcgcccaggggcgtgctcgctcgctctacggcattcgaccctacatcccggacgccaagccgtgtctcatcaaggagaacctgcccggcctctgggtcaacactggcggtgccaagaacggcaccatcgcagctggctactcggccagcgttcttcgggaggctctgaaatgatccgtaccgcaaccccggcagaccacaaggcgatcctccaggtcgccaagcaatcgaagtacaccaaggacttctccaaccaagtgatgttcagctccgaagccgcctatgcgaagggctggatccgggtgttcgagcaggacgggaagatcgttggcttcacctgcgttcgtgagaaggtgcgccagcccgaggtggttctgtacttcatcggcatcgatgagggcgcgaagggcctgggcatcgggcgtcgcctgatccaggacatcatggatcgcaccaagcaccgctgcatgacgctgaacgtctcgaaggacaacagcgccaagcagttctacgacaagctaggcttcagcgtcgtcggggagtccctgaagggcaccggcttcgctctcaagaaggagtggtaagcatgaaacaacgagtgatcaacatccgcggaacctccggctccggcaagtcgaccctgatccgccgcctcgtcgagctgtaccaggagaagaccccggtgcatgtggaaggccgcaagcagccgctgttctacgagcttcgcggcgagggcctcaccccgctctccctcctgggccactatgagaccgcctgtgggggctgtgacaccatcccttcgatggaccgcatctacgagctggtgcgtgagcgcctgggcgctggggactccgtgctgtacgaggggctcctaatctccgccgaggtgaaccgagcggtggcgctccacgccgacggcttcgacctgaccgtggtccacctccagacgcctctcgagctctgcgtggacagcgtcaaccagcgccgctgggccaagaccccggacaagcccggcgtcaaccccaagaacactgaggccaagttcaagcagaccattgcgacctgcaagaagctgaaggcccagggtatcccagtcatcgaggcggatcgggacggcgcgttcgacgccatcaaggagctgctgaagtgatcaacgctcccgctttcttcgagtacgctcggaagcggttcgccatccacttggccaaggacgtcgaaggacgtcccggcccctggaccgacgacccgatcctccagagctatcgcttctgcaacgtccaccgcgaggacgacaaggtcaccaagtggttccgcgagaacatccgtgggccgctggcgggcagcccccactgcctcctggcgaccgtagcgttccgctggttcaaccgcatcgaaacgggcgagctgatgctggacccatcggtcgggctgatggagggtcgctacgacggggaggctctcaagaagctcctgctcgagaagttcccgaaaggcccatggacgaccggcgcgtacatgatcaagagccccggtggaatgtccaagatcgacggcctgaactggtgcatcaacaacatcgcgaaggaggcccagcacctcgctcagcacatgctcgacgaagagccccagctggagggcgtgtgggaggttctccgcgagtacccgtacctgggcgacttcatggcctacgaggtagtgaccgacctccgcttcacggagctgctccaggacgctccggacgtactcacctgggccaaccccggccccggcgcggcacgcggcctatcgcgcgtcctcggcctccctctggacgccttcaaccggcattctgagaaggatcgggtgaagctgattgctggcatgcgcgatctgctggaactttcgctccagcctcagtactggccccaggaatggccccactgggagctgcgcgaagttgaacacacgctctgcgagttcgacaagtacgaacgcgcccggctgggcgaaggccgacccaagcaactctaccgacacaacagaaacggagcctaacatgcaagtgatccaagggcggaacgcccactccatcctccccgaggcgctctaccagatgcgcacccacggcgtcaaccgcgacagccgcaatggccccgtgctgaagttccctgggccagccaccatccactacgcctgcccaactgagcgcgtggtcttctggggcgagcgcgactgcaacccgttcttccacctgatggaatcgctgtggatgctgtccggtcgcaacgatgtcagctatctgtctcagttcgtgccgcgcatggcttcgtactcggacgacggcaagaccttccacggtgcctacggctaccgctggcgtcaacacttcatgaccgaccagctcgacatcgtggtcgaggcgctgaagaagaacccggacgaccgtcgctgcgtcgttcagatgtgggactcccgcaccgacttgggcttcgaaggcaaggacttcccgtgcaacacccaggtggtgttttcggtgaacgaaggcagccttgacatgtcagtgttcaaccgctccaacgacctcgtctggggtgccctgggcgcgaacgcggtccacttcagcttcctccaggagtacatggccgctcgcatcggggtgccggtcggccactactggcagatctccaacaacatgcacctgtacctggagcagcacgaaggtctgatgcactccctgggcgaccgcgccgaggagttctaccagttccgcaccggcaaggacgacccctatgccactggcgaagtgaagccgttcccgctgatgtcaatcagtccggagcagtgggagctggagctcgaagtcttcatgcacttccccgactccaccgggctcaccgacccgttcttccgcgaagtggcccgcccgttgttcttcgcccatcgcaccttcaagcagatgaaggacgcggggctggatcgctacgactgcgcagccgaacacctggaactgtgcgccgcttccgactggaagaaggctgctgaagaatggctcctgcgccgacgcgccaactacctgcgagcacgcgacgatggcccacgctacgacaattgaggcaagcgaagtgaagattcctcagacccgactcgagtccgtgatcgaacaagccgtgaacaccgtgtccggcttcatcctggcgtggctcgcgtggcagttcctggtgccggtgctggtccctgggctccagccctccgctgggcagtcttgggctgtcatcttcatcttcacggcgatctcgatcgtgcgcggctacttctggcgtcgcttcttcgagaacggtgttcaccacttcatcaagacgttgatcggacggttctatgagcgtaaatgacaagcaggtggcggggagccactacaagtcgaagatccagcactgggacttcgtggagctgaacgagctccgctacatcgaaggttgcgcaacgaagtacgtgacccgctggcgcggcaagcacaactacccggacctgctccgcaaggttgtcgcctgtttcggcatcgagctgccgacgcccaaggaagacctcgccaagtcgctccactacgtggagaagatgatcgacctgaactcccgtgggctgttcgacccacgcccaggtccggtgctgaccatcacggtcgacgacttcgccgaagcgaactctctcgacaacgacgagaaggtgatcatcgacttgctggtgaactgggaggacgcggatcagcttcggctggcgacttacgcgatccagagactcctggaagcgccggacaagtaaactaagcgaaacagcgaagggctccggcccttcgtttcattcagaaagggagaacacccgtgaagacgttccaatacgcccaagacctcaagccctggggcaaccaccactggtcgaccgccgttcgcctggagggcggcagcgagttcccggtcctctacatcaagcattcgagccgccacgcgaatgtggcgatcaaccacgccatcggcactgagatgctgaaccgcgagggggtggtgctcatcaagtcccgctcccagtacttcctgctggaggcgttcgagctgaaccagctgctcatcaagcacggtgccttcaccaagaagacaaacgaagcggaaagctactggctgctcagccgcgagcacctgggcgaagagttcctggtcgagtgcctgggccgggctgaagagttgaagcccaaggtgcagtggacccagtttaagttcgccgagtccgaccgcgccttcgaagaagtacgcgacagcctgggcatggtcagcaccttctacaaccccaccaccgctcgtattctcaaggagttgccgccggagttcgatctcgtcatgatcgaccgcagcgaaaacaccatctggctcggacggaagaactgatgcaggtaccactcttgacaccattctctggttggaaggctccagacctgaacgccctgccctcctgggcggggcacaagcgcatcgcggtcgactgcgaaactcgcgacccgttcctgaagaccctgggcccaggcgttcgccgtggtggtgactcctaccttgtgggtatctcgttcgccatcgaggacggccccagcggctacctacccatcgcccacgcgggtggtgggaatctcccgaaggagatggttctgaagtacatgaaggatcaggcagctgtgttcgacggtgagatcgtcggggcgaacctccagtatgacctggactggttggcccagtacggcatcgtgttccgccgggcgaaatacttccgcgacgtccaggtggccgagccgctcatcgacgagctccagctgtcgtacagcctggacaatatcgccaagcgccacggcatcgccggtaaggacgagaccctcctgatgcaggcggctcgcgcctacggcatccacccgaagaaagacctgtggaggctgcctgcccagttcgtcggcccctacgccgaggaagacgcccgcctcccgctccagctgcttcgccgccaggaacgcatcatcgacgaccaggagatctgggacatctacaacctcgagtcgaaggttctgcccgtgctggtgaagatgcgtcgccggggtgtccgggtgcacgaaggtcggctcactgagatcgagcgttggagcctccagcaggagaccgaagccctcgcccaggtccggcacctgaccggcgtgaacatcgccgttggcgacgtttggaagaacgaagccctggctccggctctgacccacatcggcctgaaactgaacaagaccgccgagggtaaggtatccatcgacaaggagttcctggctggcgtcgaccacgatgtggcccgagccctggagcgagcgcgcaagacgaacaagctgcgcacgaccttcgccgcctccgtgcgagagcacatggtcaacgggcgaatccacgccaccttcaaccagctgcgcatggagaaggacaacggtgacctgggtggggcagcctatgggcgtctcagctgcgttcaaccgaacctccagcagcaaccggcacgggacgacttcgccaagatgtggcgtggtatctacctccccgaggaaggtcagctctgggccgcgctcgactactctcagcaggagccccggatgacggtgcacttcgctgagctctgcggtctgcccggctcgaaggaggctggcgacaagtaccgaactgacccgaacgcggacaaccaccagatgatggcggacatggccaagatccagcggaaggccgcgaaggagatcttcctgggcctctgctacgggatgggtggagccaagctctgccggaagctcggcctgccgaccgcctgggccgtgcagcaccgcaacgtccggggcctcgtcgcgctggataccgagcgcgggcaggagctcctgcgccagggtgggaagaagctcgagattgctggcccagaagggcaggcgctgctcgacaccttcgacgccaaggttccgttcgtgcgccagctggcccgccgctgctcgaaggttgccgccgagcgtggctacctcatgacgctggccggtcgtcgctgccgcttcccgaagacgccagagggcaagtacgactggacccacaagggcctgaaccggctgatccagggctcctctggggaccagaccaagaccgcgatggtcatgctcgacgaggctgggcactacctccagctgcaagtccacgacgaaatggacggctccgtccagtcgccggaggaagccgaggctatggccgaaatcatgcgcacctgcaccccgctgaccgttccgtctaaggtcgacgtggagttgggcgcttcctggggagaatcgatgtcatgatgcctgtcacttgcaagagctgcgaacttcgctacctcgaccacctgagccactgcccagggtgtgacacgcccagggtcgagcagacccgccaggagaagtgggacctccgcttcatggagctggcgaaacactacgccgggtggagcaaggatccatccacccagatcggggctgtcgtcgttgacagcctcaaccgccagcttgggcagggctacaacgggttccctcgcggggtgaacgacgacccagagcggtatgccaaccgcgaggagaagtatcccctggtggtgcacgccgagctcaacgccatcctcaactgcacgctctctccgcgtggagcgaccctctacgtgtaccctctgccgccctgcccggagtgcaccaaggctatcatccagtccggcatcaagcgggtggtgatctccagcgattgcgatcggccagagtggatgcaagcgttccagcgccacagcaaggtgatgctcgacgaggccggggtgggggtgtccattgtctgaacagaacatgtggggaacggtccgccagaagatggcgggcctggacccggttcgtgtggacaacccggcggatccaggcacccctgacgtgaactacgtagagggctggatcgagctgaagcaggtggatcagtggcccaagcgggccgctactcccctgcgcgtaccacacttcaccgctcaacagcgggcgtggctccgccgacgtgtcatgtctggtggccgcgccttcgtcctgatcaaggtggcgagggactggctcctcctgcgaggggatgtcgccgcccgtcacctgggcaacgtgccgaaagaggagctgattgctttttcgcttgctttctggcctaattccctccctgaggaggagttccgaacatggttgaagacctacaactttcaaggtccgagcgactgctaatttggcgtcgccgggccgggctgcggcaggaggaagccgcagctcagcacggtgttagccaccgtcgctatggccgctgggagcggggcgttgaggagcccgacaccgacaagtcggtcggtatccttgacgtatacgaaaagctgttcatactgcgccgtcgcgaaggtgtgtcccagcaggagatcgcaaacgaacttggctgcaccagggcctgggtccagatgatggaaacaggtgagagcagctccgaacaactacagaactactggaagggccgtgcaaatgcaagctgacatccagatgtccgtcgccttcctccagcggttccaccccaacggaccctgggcactaacggccatctcacctgacaagaaggctatccagacccgctccttccgcccagggcaggaggacgcgctgaaggcgtggctgggcaagaacgtaggtgagatgaacgtgtacttccacgtcaacttgcccatgggcgacatcagcaagaaggccgaaaagaccgacatagaagccatgtgttggctccacatcgacatcgaccctcgggccggtgaggacatcgaagaggagcgggctcgggccttccgcatgctggaccagcacaagccccgccccacggtcatcatcgactccggcggtggctaccagggcttctggaagctcgacgagtgcatcccggtcaacggcgacctcatggccgctgaagacgccgaacgctacaacatccacctggagcgcatcttcggggcggacaactgccacaacgtcgaccgcattatgcgcctgccgggcaccatcaacctgcccgacgccaagaagcggaagaagggtcgcgtcaaggccctggccaccctggtcgagttcaacgacctgtcctactcgctccgggagttcacgcccgcgcccaaggtgcagaccgccgatgagaccggcttcgcctcgggcaagacggtgcgtgtcagcggaaacgtcgagcgcctcgactcagtcgacgacctcgacaagtgggaggtgccagactggctgaaggtgctcatcgttcagggcaaggatccagacgaaccccacaagtacgccagccgttccgaggcgctgttcgcctgctcctgcgagctggtgcgccggggcgtgcccgacgacgtcatcttctcggtcctgaccgacgagtccttcggcatcgccgagtcggtggtggagcacaagcgtcctgagaagtacgccatgcgccagatcgagcgggctcatgaagacgccatcgacccaatgctccgtcagttgaacgagaagcacgcggtcatcggcgacatgggcggcaagtgtcgcatcatcagcgaggtcttcgacccggccatgaagcgccataagatcagccgccagtccttcgaggacttcaagaaccgctaccgccacatcaaggtccaggttggcgacgacggcaaggggaacccgatcctcaaggccgcaggctcctggtgggtcgaccacccgaaccgccgacagtacgagaccatcgtgttcgcccctgggcacgagctgccggacgcctataacctgtggaagggcttcgcggtggacgccatccccggtgacaagcacctgaacttcctggagcacatccggaagaacatctgctccggcgacgaagacctctacaagtacatgatcggctggttcgctcgagccgtccaggagccagacagcccaggcgaggtcgctgtggttctccgaggcaagatgggtactggtaagtcattcgtggtcaaggtgttcgggaacctgtttgggcgtcacttcatgcaggtctcggatccgaagcacctcgtgggctcgttcaacgcccacctccgcgactgcgtggtcctgttcggcgacgaggcgttctacgctggcgacaagaagcacgagtcgatcctcaagaccctgatcaccgaagaagtcatcgtggtggaaggcaagggtgtggacgcggaagcggccccaaactacgtccacctgctcatggcctccaacagcgactgggtggtccctgccggcccggaggagcgccgctacctcgtcatcgacgttagcgccgaccggatgcaggaccgcgaatacttcaaggccctgcggaaggaaatggacgaaggcggctcggagaacctgctgcacttcctcatgacctacgacctgtccgagtacgaggtccgggcggtgcccaagacccaggcgcttcaagaccagaagatgatgtcgctctccccggagcagcagtggtggtatgagaagctccactacggcaggctcatgggcgagcacaccaagtgggagccggaggttcagcagaaggagctccaggaggactacctcgcgttcatgcagaagctgggcgtgtatcgcaagatgtccaacgtcgccctgggcaagttcctccagaaggtctgccctccaggctacccgaagtcctaccagaagcgggctgagatggtggagtacacgccggacggcttcgcgatcaagaagatgggacgcccgtacttctacgagctgccggggctcgacatcctgcgcaagacgtgggacgagaacttcggcggaccttacccgtgggagccaatcaacgagggcaaggaagacgcccaggaagacaagaacccgttctgatgatgacgtctatcaacaacgagcaacggagagacgtgctggtgcggctggggtggaacccagtcgctgtgcgccgactcggacccgaggagcttgcccaggtcctgaaccgcgcctgggcggagcgccctctccgggttgagttcgaagcattacgtcaacttggtcatgcttttgaacaatccgaaatatctgacttgccaagacaccgaactttcgaccagaatggcggtcgttcccacgaaggaacttctgccaagaacttagaaacggagtaaagaagaatgaacgcagcaaacaacctgttcaagacccaactggaaggtgaaaccctggccgctgctctcgagctgcgcgagcacagcaagcgcctgggcgacgaggtcaacccgctggttgagcaacacaaggccctcctcaagcagctcaacgagcttgaggcccagatcgaccagaagcatgaggcgtttgacaccgcccgcgtggccttcttcgaagggctggaagtatccctgggtcacgacctggacgcaacctccctggaatacgctgacaacggcgctgtgtacgtccagcgcacccaggaagacctcgaccggaaggccgctatggcctcgctccaaggcggcaacccgctggctgccctggcggctgccctgggcgctgcacgggccgaggacggcgctctcgacctcgagaacctggaagcctgcaacaaccccgactgccaggcctgcggcccgctgcgcagcgtccactaactccgtttccacccacttcgagccccggctgccggggctccactgttttcgaggcactctcaaatgtccaacaccaatccgctcctcctcgtccgcgacttcaccctcgccttcggccaagaatggaaggaggagcccggtctgcccacgccgcgcaccgccatgctccgtgtccagctggtcatggaagagatcggggaactggcccacgcgctggctgctgctgacaaggtcgaggcggtcgacgccctgactgacatcgactacgtgacctacggctgcatgggcgcgttcggcacccacagccccgccgcccacaccctgacaccgtccatggccctgccccgcgcctggggagaccttgacatgtccggccaactcgccgtgttccatgagatcgcgaagctggccaacgtcgccaccatgggcatgtcgatggcgttcttcccggacaaccacaagagccggaacggcctgcagagcctcaccttcgcccttccgctcatcctccaggcgaccgccaatgcttggtcggtcctgggcctcatgccgtaccgcgaggctgccttcctggaagttcagcgggccaacatgtccaagctgggcgaagacggcaagcctatcctgaacgaagccggtcgcgtcgtgaagggtccgaactacgtcgctccggaccttgcccgcgtcgtggccgaaattgacaaccagctgacgctcgaagtcgcgctggccaagtccaccggagaagaggagattgcccatggcaacgcctgagatggaagttcgcctcgtcgagcaattgcgcggcgacttcaagattgtcgtgtacctgcgttcgcgccggatgagtcacatccgcaccctgggtgagatgaacccggctgctgcccacagcgcatctgacctgatccacaaggtcggcatccttgctggtgccgtggccgagcgccaggggcagaactacggcgacaaccacgacccggacgagtgctaccgcatcgcgacggagctcttcaaggaggccatgctggaatacgcccagcggaagcctgacctgcgcctcgccgtgcagaagatcgtccgcgatcctgagaaccacgttgggcagaccgcccacgtttcggccaccacgaaggggtgagtcatggctaaggcgaatgaaccagtcggcgaggtggttgtgaagctgatcatcggagacgagtaccaggagatgactgtcccggtggtcgccttcgtcggaaagctggccgtccacgaaacgattgcggaccaccgcctcgcagaggcgaagtcggcagccttcagcgtgtcgcacaccaccaccggcctcgggctggtgaacggggtgtccaccaagaagctcgccctcgcctttgcagaggaggcgctcgctgctgcggaggagcacggcctggaactgggcgttgcaacacaggagcagctgctccagcagcaaccggcctactccatgtggctcatgtgggcgcttacggcgcgggccgagctcaagacacgaaagggcttcctgtatgaagaataagctggcctggattgtcagcgccggggaatgcgacacggacgacgagtgcgcctgtgtcgtgttcgcgccggacgacgagagctcgatccagattgggttccgcgcccttgggctggaggaccaggaaggctgctcgacctcccgagcgcccgagttcgacgcctgggcggcccaaggtgaggtaccgcccagggtgctgctggagcacggctggttcatcggctgccatgggtgtgggagctgcatccaccaggacgatggagacgccaccgagaaggccatcgaacatgggagcttcttgttctgttcgaaggagtgtcaggtggagcagatcgccgaggtcatgaaggtgaacgcagccttcgaggagttccaggaggaggtgaaggcccggtggcctgggcttgccttcaccggcttcgagggtggctggcccatcctaacaccgttcggaaggttcacgttcccaggctcgctgtacggcgggggcagggtccggaagaccagggacgggaagctggagctggctgtggcagccggagacatgaaagcctgggagctgtggagctcccaggtcggcaagtcttctaagactgggggttaggcgctttgacggcgctcttcttggtggcgacggcgctcgacaccgtcccaggtggaaacagcgtcgttgctgggctgcttcatacgggctgccggcttacgaacgtcggcgactacgtgttcgcactggaacttgcccttggcgagacgctggaccgggacgcccttccggcgcaggcggtcgataaccgatcgggcttggcgctcttccatatcaagacggtcacacagggtaggcacatcaacgccacgcttgcgctccagcagacggagggctttggcttcagcgacgctcaggtttgcgatcttttccatggtaagactccatttctatcaaggttgattaggcgagacatcttactccgcgaaccagggggaaccgtttccgcccttggtaagcatcatcttagtgcttcggaggcagaaggcaagcgttttatgcaaaactatttacttcagtctccggctgggctctgcgaacgaactcagcacccagcgaaggagtagacccatgaaagtgcatcgagttcggttgacctctgaggaaggcttctacgagaagtgcagcctcctggccatcggccctccgaacgagcggggcatgtgccctatctataaactgcccaggcgcgacctatctaaagagaaggcggaggagctcatggccaagatcctcaccgccgggcagttcgacccggccaactgggagttcgcccaggagtacgacgccggcaaaaatactttgacaaaggtgcttgcccatcttcgacgttgggcccatgatctgcttacaccggggcggtcccggaaacttagaaaaggagagtcaccatggcccgcaatgtttccttctacgtagaacgcgccaacgaagcctttgaaaagggcttcaccagcaaggctggccagaaggctgcgatggactccgtgaccaaggcttacgagctgctccgcgccgagatcaccacccttgtcctgggcatcgagcacagcgagcgcaccgaagcccacagcaacgtctactgggacctgccgagctaccctcaccagtggaaggccaagcaccgcgaactggccacctccgtcttcccgcaaactgcctccatctgcgaccagatcgaagagctggtggcgctgcgtcaggccctgaaggacgccccggtcgtcaagcaggagcgccaggaagatgagcgcgttaccctggtccagagcaccatccgcgacatgatggagaagcgcaaggctcagtacgctaggggcctggagctgcacgacatcttcggcggcctcccggtccacgcaaatgtccacctcgtgaccaaccagcacggcaccaccttcctccgggccttctatttcatggacgacaagctaaccccactgagcgtgatcctggccgtgctccagaccaaggcggacgaggccaagtaagagacgattgccgggctcttcggagcccgcgcatactaaccacacaacccagaaacggagcaccacccgtgaaacacgatactcgcgaggcctggctgaaggccgcaaccgccctgctcgacaaggagttcttcgaaggccggggctacaagctccccgagaagatccaggtcgccgttgggttcccctaccgcgcctccaaggccatcggccagtgcttctccccagacgtcacgaccgacgagaccacccacatcttcatctgcccgtccatgggcgacgccctccaggttctggccacccacctgcacgagctcatccacgcagccgtgggcatcaaggaaggccaccgcgggctcttcgccaagctggcgcgagagttcggcctccagggtaagctgaccgccacctacgctgaggaaggctcggagctctggacgcgcctctgcaacatccaggcggagctggggccttgccctcactcggccatgaagaagacccagcggcctcgcgggcaggcccagggtggctgggtccgcatgttctccccggacaacccggcctacaaggcgctggtctctcctaagatgctggaggagttcggcccgcccatggacccgtggggcaacgagatgcgcccagtgggagagcagtgatgcagaagccgtttctggtcaagggccttggctggcccaccacctggggcaagggcctcaccatggacaaggccatccgagcctccgaacttccagcgggcgacccggtccaagtgtggctggtcgaccccagggctgtgatcgacgaccagggcaacctggtagccagctcggcagaacacatgggttcgggtgagatctcagcggatcgcaagtctgtcaagttcatgcaccagggtaagggagagctgtcagttccgagcgaaaattccttgcccaaggtgaacgaaccaagcaagattcgctcaggcaatgagccgacccaaccacctacctctgaaacagggaataccgaaatgtccgagaatactgaagccaagacccgcgctccgaaagccttcaacctgcctgcggctgagaacgccaaggccccggctgccggctccaagcgccacactgcatacgagctgatcgctcgtccggaaggcgctaccatcgagcagatcatggaagcgaccggctggaacaagcgcaacgctaccgaaggcgtccgtctgctgaacaagcacaacggtctggccctcgtcggcgacgaagctggtgtgatcaagctgggctaagcccggttcgatagcaaagccctctccggagggctttcttccaatagaaatggagcaacacccatggcgttcaagcccatgctcgcagcgacgctcgagcccttccaagtttcacaagtcaaattcccagtcctggtctctccgaagctcgacggcatccgctgtctggtccgcgagggcaaggccgttacccgttccctgaagcccgtcccgaacgagcacatccggctgatgctggagcgccctgacctggaaggcttcgacggcgagctggccgttgggccgctgaccgcgccagacctctacaacaagacgaactccggtgtcatgtcccgctctgggcaaccggagttctgcttccatgtctttgacatgcacaacctaccgcagaccacctaccgcgagcgcctcctggaagtgcgagcgtcggtgccctcctcaccgctggtgcaggtggttgagcacaagctggtcgagagccccgaggagctcctggagtacgaggccgagctcaccgcagccggttacgagggtgccatgctgcgcagcctcgacgggctctacaagcagggccgctccaccctgaaccagggctggctcctgaagctcaagcggttcatggacgcggaagctgtcatcatcggctacgaggagctctattcgaaccagaacgaggctaaggtcaacgccttaggccacacggaacgctccagccacaaggccaacctagtgcccatgggcgtcctgggtgctctgcactgccggaccccggaaggcgtcgagttctccattggctccggcttcaccatggcggagcgggcctcgctctgggccatccgggacacgctccctgggcagctggccaagtacaagttcttcgcggtcggtgtcaaggtcgccccgcgctttccgacgtttatcggcttgagaagcccggaggacatgtgaggcaggactccctcggacgtattgtccagccgccgttcgaggagcgccttcgggcgcagctcgagaagtgccttctgccggagggtggatgctggctttggcagggtgcgaaggcgggggctgggggctacccagtcatccgaagctcagagggcaagcagactagggtgtcccgcatcatgctggagctgtccggaagggccagaccctcagagagccacgtggcttgccatacatgcgacaccccggcgtgcgtgaacccacagcatctgttctggggcacgaatcgggagaacacccaggatgctggtcggaagggcaggctcaaggccccgaccggagctcacctcgagaaactgaaggagctcaccagacagcgatgggaggatcccgagtttagagaacgccaccgccaggccatggtgaagctggcgcaggagcctgacttcggggagcgagtgtcgaaagggctcaagaatcactttatgtcgctagagtagttgccttttgctcgctcttcgccaacaattcgctcatctgccacgaatagcgaaaggaaatttaccatgcgctcaatcctgattgtctctgtgctcgtagcctcctgcacctggggcctgatcaacgcggtcgccgatgtcctggacgccccggacgttcacatctcgtactccaccggcgagtgtgtgcggatcatcgacgagaatggtgagcgcccctgcccgaaggaactgcctgccaagtaccatcgggtgtgggtcgagtaagcccgccaacacagcagaaacggagtaacagaaatgcttgacaagatctacgagctcccgctcagccgaacctacgtccgccactggggcgtggtcgaggcagtccgggagttgtttcagaacgccctcgacagcgactcgccgttcgagtactcggtcggccaggacaccctgagcatcaccagccgcttcgcacgactggagcccaagacgctcctcctgggcaccacctccaaggccgacgccaaggacaagatcggctccttcggcgagggctacaagatcgcgctgctggtgctgacccgcgagggcatcaaggtcaccgtcctgaaccacgaccgcaagtggactccagagttccgccggtcgcgtcagttcgacgacgaggtcctagcgatccgagacagctcgtacccggagaaccggggccagggcctgaccttcctgctggagggcctctcgcaggccgacctggaggctatccacgactccaacctgcacatgtggagctccgtgggcgaggtcgacaacacctcccgtgggcagatcctccacgaccacccaggcaagctctacgtcaacggcctcttcgtctgcaagacagagctgaagtacggctacaacatgaagcccgagttcctccggctggagcgcgaccgccagacggtgagcaccttcgacctgaagttccacgccaaggacatgtggttcgagacccggaaggccgactcggtcagccagatgatcgcggacaatgttcctgacatggagtacgccaactacggcactcctgacatcgtcaaggaagcctgctaccggctcttcctccagaaccacccagactccgtggtcgccagctctcagcaagagctcgagcacatggtggcccagggtatggagcgtgtggtcgtggtcaaccagaccttcgccgagatcgtcaagacctcttccggctacacggcggggccgctggtcgttctgcgcagcccgtgccaagtcatggaagactggttctcccagaaccgccgccacatgcggaaggacggcatcatcgccttccgtgaactcatcgaccaatccaagcaatggaaactgaaatgactcagctgataccgaaggacaaagaacccgccaccgtccgcgtgggcggcactgccccggcggagcgcatcccgaccgcgatggagctggcgctccagaaggccaagcagaagaaagacggcctcaaggccgctggctacgccgaagcctacggcgctagcaagaagcgcgtgaaggaaatgaagaaggaggcccgtcgtggctaagtgccagggctggaccaagcccaacggtggagcccgcaagttccactacttcatggagggcgacccccggtcgctctgccagaagttgatgatcctgcggcccgaccctgaagcgttcgaggacgctcaccacgaccacaaagagaactgcgcggcctgccgcaaagagctctatcgtcgactggagaaggaagatgattgacttcatgatcgttggcctgccccgctccggcaccacctgggcgtcgaactggctgacaacggacgcgatccactgcgttcacgacccgttgtacaccgagcactactcggactgggacgagcgcctgcccgccctggcccctgctggtgccgtggtcggcgtctcctgcaccggcatctggcgctgggctgactgggtcaacgctcacccggcgcggaaggtcatcctccaccgtgacccggacgagatccgcaagtcgatggctgagatcggcatgcctggacacatcggagacgccgagctggaagcccttgacagcgtcatcggcctgcacgttccccactccgacctgtttgacaccgagcacgcggaggagatctggaagcacctcgtccctgggcagccgttcaacgcccatcggcaccgggcgctggtgcaggtcgaaatgcaaccccaattctctggtctgtcagtcggcccagaggtaatgcgaaagctgctcaacgaacttgagcgaatctaaggagtgacaccatgaaacgaaccgcctcgatgcgtgccctggccatcgctgcaatgatgggcctcggctccgtcctgcccttctggcagacctccctctccgaacgccgtgggccgggctacgagcgcctagtgcgcagccgccctgagcgttccccggaagagtcccaggcacgcctctctgccgccgaggcgaagcgcgagcgccgtcgccagcgcaacctccggctggagacccgctagccatgatgaacgcctacgccatcatgtactggaccggcgtcttcacctacgttgtcagcgtcctcccgaccctcgcgctggtgctgtggttcgggatcaaggtcgtcgacctcatgggcaaccggctgtggaagaagctgcgtgcgtaccacgacctgaaggttctccaagaggagcttcgtcggctcgagtatcaaggcaagctctggaagaagcccgagccgccgaagtttgatatcgaggatgaggacgactagccgtccagcggcacgtgccatgggctgccgctccgctagataataccctccttgacaaccggggagggtgcatcatgaaaccgagttactgtgaaatgcagaagaagctgatcgacctcctggagagcctcccttgcggcggaaccctggaggaactggtgaacggtctgaactccaacgcgagcgagctgcgccggttgatcctgcctctctgttacgctgggcgaatctccgtcaccccctaccgccacccgtccaacgggagagcgacctacctgttcaaacttaggaaacgagaatgaaacgaccgaacgcatacgtctttgacaccgaaacgaccggcatgaaggagccggtcgttgttgaatccggccttctggccgtcgccttcaacgaacacggggcgctccgccccttgtggaccgacccccaggtcgaacgcttcaaccccggcaagcccatcgagtgtggtgcctgggcgacacacttcatctccaacgcggatgtggagaacgcccggcccgcttccgagtttgccctgcccgaaggcaccgaatacatcatcggccacaacgtcgactacgactgggaagtcatcggcaagcccgacgtcaagcgcatctgcaccctcgccctggctcgctccgtctggcccgacctggactcccacaagcagctcgccatcgtctatgcgctctccccggctcgcgccgagggctgggccaagggcgctcacagcgccggtgccgacgttcagatgtgcggcttcatcctctgggcagtctgccacgagctggacgtcgagtcgatggaggagctctgggaagcctccgaacgggctcgcatcccgacccgcatgcccttcggcaagcacaagggtatgctggttgccgaacttccttcggactatgtaaagtggcttcgtcggcaaacagacgtcgacccctatctcacgatcgcccttggaggcaagtgacatggccctggtccacttcgaggtggccttccacctcaacgtcaacccggacaagacccacgtcatccggctgctgacgtccgaagatcctgcgtcggtggacgactacctcgtgcggacccacggcgcgggcaacgtcgttctccactatgcgatgctggaggtgaagcaccctgggcacgaacgcacctgcggctactgtgggtgtaccagaactgtgcatgagagccaacctcgccagatgcatccggcgatgctcgacaagactctgtggagacagctctgaccgaaggagaaacaagatgagcaagacctttgttcctgacatgccgctgcgctaccgccgccttgggctgtcctgcccaaggacttgcgatgtgtgcggcctgcctcggggctccaggaaggtgaaccacagcaagtgctccaagattcgccagcagaggccgaactgatgccctgcccgaactgcggagaggacatggaaggcgacggcttcaaggtcgttcgccactgccccaactacgaagaccactgggacaaggagccggacgctgggccgttccactgccctgaggagaaacaagatgaagaagacccttcgcggcctgaagcgtaaggtcgccccggacggacgctacgtcctcctgcacaagtggaagaccgagcacggccaccggctggtgcgcatctggtccgacgagtgggactgctactggagacccagtcgggcaggctacaccaccgatgtcgcccaggctggcatctaccgtctcgacgacgccatcgacgcctctggacactgcggcccggagaagaagatcgtctacgagttcctgcccaagaacaccaaggccgtcccgactcaggagagcgcgggcgacccacagctgatgctgaagtgcctgggtgaaccgcgatgacacgcccagaggaagtgcttggccgcgaggccgagggtaatgttatccgaatcgatggcaacgagttcacctgtcgcgagctggtgctgatggcgc

SEQ ID NO: 30 - DNA, 45434 bp, unidentified
  source 1..45434: mol_type = genomic DNA; note = EPa82
ccagcacgtcctttcgttgccggtatggaagcaatggaagatgccctggatctttaaggagaagtaatatggcaacttatgtagaaactgaagccgctggtcctggtggccgtgcctacgtggttgatgtgccaaaggtcttccgccgtaatgccgatggtgatctcattgagattacctcggatgcgggtcgagtgaatactaacatcgtaactgctactgagttcctcccggactattacgcagttaaagagaacgcagccctggttgtagagaacgtaacggcttctttcccggataatccatccgaggctgttatcccctctgtcctggttaacaccctcgtgggtgccccaggggagacctctggtggtaaccgagacccaggtcacgtcattggactcttctccgagaccatgatcgaggccccttgcggtactgccttcggtagtgaattccgagtagacccccgtcgggaacacctgggtgtttacgtggctatcaagcacgtgattggtccagatgaccaaaacggtggtaccatcggtgactacattatcgagcagtttgacgacatgcgtggtcctgtgaagaacattggttctctccaacagaactaccttgacccccgccttgtgactactcaccttgggggtaacgttgtcaacacccagcagcttactcagaacattaccctgactaagcagcagtctggttggttcttcatgtctcaagggaccacggatatcaccgtgactcttggtccagatgtaaccccaggttgtcacttccactttatccagggatcggcagctaagatcaagttcgctgtatctccggacaaggcttggtatgctaagggtaatcagacggagactgatggtcaatttggggaatgcactgtccgagtgtatcctttcggtggtaccgtgggtaccttcaaatcggcagcttaattaggagttagttatggcaggttatatcgctgacaacgacggcaacagtgtattcgttattcaatcgaaggctattgctgtacgtaatgaagatgggaccctccgacaagtcattggcccgaaagactttgagcctgtgaagtgggaggatattgaggggaagccggagcttctggaggtgggtgctaaggctagcgaggctaagccaggtaactggaagcctaaggctagtgaagtgagtggccttgatgcagccattgcagcttacgtcaagggtaaggtcgctgagatccccgtggcttcctatacggacactcacgaggccctcgtggataagttcaatacactgctgaacgctctacggagctaaagataaggccccttgggatgatacccttggggcctttttttttggttactcgatggatacctacagtgaacctgcccaagataatacatcgatgaggagtctggatatttctcccagggtcaggagtaacatcagtcagctatatcctacataaaccagcagggcaaacaaggctgctaccgcaatgtaggtccaagggaatccacccttacccttttgatctttctgcataacccctccaatctccgtagaatacagaagcccttaggtctaccaaatctagcatcccttcgaggaattcaatctgtcttttagcttcttcagccaattcttcaaaggaaaaggccttcgcctcagccttcgcaagagcgctttgcgtctcttcaagtgctttctccagttcagcctttgtcatagtacaccaccttgtcactgctcctgagaacatattcagaatcaatagtccaactcatggtagggcatttgattcgaatcatcttcggagtaaaaccatcaactgtaccaatagctagatgggaggaggtgttcctgtggaccaggaagactacactgtcccctacctctagcttacgtcccactcggtctttcatagattaccccaagatatccggaaggtgaacgctggggatgtagaggatctccaggacttcgatggtatacatccctcgcttaagcccctcctcagcaccccctttcccaaacttcatatccagccagagttctgcggagatcggcgtcttaaacgccaacccccgttgaccgaagtcatgctcagatttaatgtagtacaggtctggcaagaacttactcacaggaactcctccacgctcatcagcttgaggtcgtactctccatccttgtggttccggaggagggctacgccccgccagtggtcgttaccctggggccctttgtaggactcatcatgggtgtagaagctaccgactacaagcccgtggattcgcttcttgcctactgcctcgatgtggtacttgaatccctgttcgtggccttggacgaagctgcgcttgatcttattgaggcgatgctcggcactcccgccgtatggacgaccactgttgggattgtagaagtagtgggcgaaggcgacaccttcgataacacccacgtcgaggaaatcatggacaatccaatcggacagatcaaaatgatcgtacccaataaaaccttggagagcagggttagaattttcataccgcttgatacgctcctcgtggtttccgatgaagaagtgcatttctggtcggtagatacgcttcttacaacccgcttggtgttgctgtaggcggcgaagaggatcgagcagaactcgcatcgcatcattaccagcttgtatgtcagcgaggactcggcggccttcgatcttagcggtaccacggtcgtagcttgacagactgggcatgtcccaatggtccccaatatgaacaattcgcttggggcggttacgtgcgatccactccccaaggttcccgaggtgatcgatgttgacctcggatcgaacttgggtgtccgcaatgacgagagtgtcttcattatacttcttactcattagggaaggactccttgaaagtctctagagtaaaccagcggaatccgttacgttcggcccattccgccatggattgctttgtgccatctttacgcttggaaagccaatggcaagctgtgttgggtcgctcgaagataaacacaagttcagtatctggggggagagcctccctcacccagacgtacttggctgcctccgaggcctcctggaagtaccccttgacttcaaccagcagatgcttcgtcgatccacagggttgtaaggtcgataccttgaaatccggcttgtacttgtgttcgatgacgtatggtaccggctccggcttgaactgcatccaaggcatcgtctcgtggacgatcttctcggtttcgctgtcgtacttcgtcccaatcaatgacttcagtttgggtctgaagaatctcccctgctttgccaatgagccctccttcttgaagcttacggacaaccgatagcgtcccctcagtgaggacagagttagaccggatcagcagccaaacccaatcccctagacacacccggaactccggatacttcagtttgatacgttggatatgagagacaaccttttcaacttgattgtcagttaggggttgagaatgatccaggagagggtccagaagacggttcagggtaatgcacttctcttccttatcaaactcataagcttttgtgcggtagatttgagacttcaaacccaaccgatttacaggccaacatgcgatctcacatagtcctacatcgaactctactgggtgggagtgagtagtcacgacgaggttgacgggtaggtcaacaccaatagattcccacacatcaaaccccgcaggatacccatcaggcttatctccagtcctacaccggaccttcttgtggcccagcttgttgtagaaccgagtgacctctacttctagggtatcatcatcacaggggataaaccgtgggccgaaccggctacggcgagtatcagtagggtcctccacgtatggcctacggacatagaggtcgacatccttgggtgcaaccccgttgtctgcatcccgaaggaaaccaccagcgaccttgtagtcagtgaagccaagaccttcgaggatctcaaagagaccttcacagatcctctgtgcttcatcaatagaatatttcttcatcgtcatagggaatctcccaatgtttcttcagtgagcagtgatactcgttaccggactgctgaatatcaagccaagagcggtcccgaatgaggtagaggagacgaaagttttccacaaggtactccttccaattatctccgtacttctgttggtaggcgtaagcgcaagctgcgaagagatccctctcagtagaaagctccccaagcaaatctgacgctgtctttggtcccgtccctgggaggcctggtatgttatccacggagtcaccaacaaggagttgcccgtagaggaatgccgtaccgttgccctcaagtttccatgacttctgcggtttcttaacaccatacattcgccaagaagcggagactgttccaaggccatcgacttgaaatggtcccaactccggctgggaatctccacagggccaactgtaatggtagcatcctgggacttggcggatatccttgtctctagaacacgctgtaaagttatctccctcttcagtccctcgaatcccgagccagtcatcagcctcgataccgtggaaagtgattgctccccacttgtccttaagtctggctgacacggtttcccagtgatgaggcttttcaagaccgattcgagtacccttatattgcttgattttcgcaagctccagcctaaaatttccttggccagtaaggtagatttcacactcatctgcatttacccttttgataatttgttcgactttatcatcgacgagcttatggacctcttcctcaggccatggcttctccacctggatatcgaagatgtgttccttcgacatagccacgtggcctagctcatacctaagaacgtcaccatcgataccagctatcatcacgctacctcttctacgacctgggattctttgagcttctcttcccagaagacacggagggcaaaggcttcacccttggctcggtactctgggtgctctaccactggattggccagtgcttcataccccttccagtcgtaatactcgctctcttgacgcttggctttgtccatagcttcctccgttaggctgtagcctggggtaagccccaggtctacatcgacgccaatcacagagtagttgctaggaacagtcttagcccttgggtccaacagaagttccattggattcctcctcttgctgaatgacgagttccagggacgctagggcgttccacacttcgtgataccggtggggtagtttactttgggggtccaaagcttcacccttgtgtcgctcaaggaggtgtctcccgaaggcagcgtcatatcgctggacaccattctcgacagacctccaacccccgcgactatatttgctggctccgaagttagcaacttgtgccactgcatatagagccctcgggaacgcttcgaagatgattccaacatccaccttgccgctatcgagcttagcgcccggctcaccaggtttgattccattaggatcgacctctactttattattagatgcagctgtagaactcaccacccgtacaccccacactctctcgaattcaattaagcagtaggggcagcctgaccggcatacccccgcctcgtgatcctccaagcccttagataggagcgtcttcgtcatcgaatacctcgtcgaatacatcctcgggctcttcctcggtgaaggcaccaccgaacagcggatcatcctcaccgtcaccaccggatacgatctcgtggagtcgtacaccacggaggcgcagggccgtcatagtacccttacctcgcggacccttctgagtctcgatcaggataccaacctcgccagtagaaccaccccacgggttggggccgtcatacggcttgttatccgaggtcagaaccaccggcttcattacagcagatttacgctcgccatcctgcatccaatcaacgtgcttcttctgcttgaccttgaacaggtactcgccatcacgctcttggtatttgatggtacccttcagacgggcatctttggattccatctgctgtaccagcttgtcggcctcttccttggtcggaatgcagatggttacttggtagacttcaccgtactcggtgtccggagttacgatgtaggggaagatcagcttcgctaccgggaaggtgaatcgttgggatactttcttagacatatcttaaacctctcgtagggaagaaggtattataccacaaagggggctgaaagtcaacccccagatgtatcagtgtgtgtcataccacgagcgaccagcgatggaatcactagccaaaggacagttaaccccgaggagaactccagcgtcccggacacagatttccatctgtccacgtagagcaatgagatcctctgggtggcattcccactgaccttcatcatggatatccaggactttccaagccctcaggtttaacctgcggactcgctcatccaggagtaccattgcccacttcatgacaatagcacctgctgcttgcaggagggtgttcaatgccttatggatcatcacgtcgccagactcagaacgtcgcatggttagctttcgtccgtctagcccttcgagataacctctctcggcttcctgcttaaccctctcaatcagtgcagcaaggtcagggttagcctcaaggaactgggcccggagtctagccccgtctgccctggtgcctccaatgatagtcccaatcttggcatccccagcaccgtagatgaaggcgtagatgaacgtcttagcatcgtcccgtgtgggaagccctgcggctatctggttggccgtgtgtacatcaccctcgaccacctctttggtgtactctgggttgttgatgtaggatgcaagcatccgaagctctagaccagcaccatcgtagcccacgaataccaattgattcgctgggacgtatacccggtactttcctacagtcttccacttacccttcttgagttcctccacgatgttagtgaagggcctaaccctttcgttctccccaagatcacggcggaggacagtccatttccattcaccagcctcaggtgtcccctggaacaaccctcggatttcaggtccgaaaggagaacgagcagcggggatattgactactacacggtgcctcatgcggcccgtaggtgttgcacaggggttagcactcccctctaggcgtccatcaggcctcacctgatctaccagcccctgcaagagggaccgacggtgggcccaaaccattcgctgcatcaccagcttgcccaggtctccctggacggtatccatcgactcttcagtcatcttcggagtcgttaggaccttacgttgcttttcgagctttctcttgacttccccaatggtagttttcccagggatgatcccctggagcttcattcggagtcgtccagatttgctctgtcggagatcctcaatgtacttattcaaggattcattaaggtcagatccacgtagcttcttgccatcagtgccgacagtaatatccttgatgttccattggtcaggtatccatccctgatccagcatccagtccttgaacttggcagtcttaccaaggtcgaagggtacatactcgattgcagagaagggaccagatacctcgaagtgcccaagacgttgccacagggactggagcctttggttcggcttaccactctttaggaatggcttgctgaaggccccagcccttacgatcatcatgggcatctgggggacagcctcaaggtcaatcttgaggattcgttcgctaagcacatggatcagccacttggcccgctgagtctggaagtagactccacgtttactctggcggctgatgatatcagctaccttgtgctcaacgaacagtgactttctccaatccacttaatcccccttaagacgctccgccagattctctacaactgtctccacagcttcgtgggatacaccctccaggtaggagaggtagtccacggtaccactgcggtccaacttccattgctgctccaggaaggctacagcaacttgtttgagcaggaagtcatctatccgctccatgagaatactcttgatcttgctcatgtaatcaccagtcgaaaatgaagtaggaacacccacgctcacaggccaggtctaccaggtaccaggacaggtcaatcttgcgctggatatccttaacgtcgctcagttcttcatcggatagctcgaacccatcaccccgcttctccttcaggtatttaaactcccatttcttctcttcttgggaggtaaacaagaggtctcgcggatctagctgggtattcctgtcgatgtagaagtcgtcgtacaggctcagatccttctcccgtacccggctattgcgtttaggcgagtaggaactcagatccaggtgggagcctgagaagtagctcacccccaggaatccagcggggaggctcaggaatacccgacgcttctcccgaagggtaatttggggactgctgaggaacttccggatgttagtcctttgtatctccatactcttatggagggcagaggccatattacacaggtacttaccacggacatgtttggaatagcttacatggtcactcatttgtatctcctataggggtaaagcaaccccggacaccttaaggttattataccacacttttctggatttgtcaagccttcttgtggaatactttgtcgtaccacctgtagaagtattgagcagaggtaatcccaagggcacctccccacccggacacgaagataaaccatccgatctccaagtgggaggaggctaccgccttgatgtaagcaaactgagccagcgtgatacaccaagatactacaaacccagccttgatcttatcatcccgaaggagtttagagttcagacccaggagaaatacctggaagaatgcactccagaagatgactaggacttgtagggttattgacatgactcacacacctcggggtctaggccgcaggcactacccaaggggaagtcatcagcgtcgatctcggggccaccccagctaccagagaattccttctccagggcgatctccttaagcgcctgctcttccaggctttccttcttactggtcatcattgatctcctctacagaaacccatccgcggacagcaccgatctcgttagctcggacggtcatggggttggcatcggaatcaccagcgaagaatctgatgatatccaactcgattcggtagaagtctgcgttgaacaccttggtgtcctggaaccccacgttaactcgatacttcttcactcttacctcccagcagttcttccagattagccagtaccttctgggccttcagattgtcctgcatgacctgggtacgctccgccttcaggagactgatctcgttgtagatccgttcagattcctccgaagactcttggataaaggtcttcaggttaaccagcaccttgtcgaaggaactgaggatgttgctgatgctaagctttcgattgaacatagtgagtcctcgggggcccgaaggcccctcttcatttactttttcttgcgaatgcctttggctttacgatcgcccacccgaccaccatcagcagcgttagaagaacggccacggacgcgaaggttagaatccccgttaccgccaccatctttaacacgtttgatatgatcgacaacctcgtcggttccgagcttcctgccaagacgcttttccacctttcggcgggctcggtgtcgctgagcatctcctgacttagagcccacgcccgtttcgccgcgtcgaatagccagttctctctcacgcttgtagttcctcactcgctttttagccaatctacagtcctccattcaacaagctcttgccaagtcatgccgagtacccggaggaggtagttgaacagtgcgtgactgaccactccatcctgaaggcaatactcaaacatttcctctgagaacttggagaagtcgttgaaatcacccttgtgacacttcaggaacttaccccaggctcccagggaatgaccctggggcctatctggccaagtcaacctcgatgcaaccaaggtgtcatagcttcgatctgggggtatgataatcccatgaagtttctcaaggacccggttgtcgtagtcaaggatgttgtgaccgactacgaactttgcatgggcgatgatcctatagaacacatccatttcctcgggccggaatccccggactaccccagtcggaatgtctacaacaacagcgcaccaaagccttgtgaccgtattgaagaggccgtccccctctaggtcatagataacgtaatcaaattggggtgtcatcgtcagcaggtacctcgtcgtaactgccctcacgttcaaccaagcgacccgtctctgggttatacttggtaaacactaggccagtattaccgtagttcctgtccttgattacacggattctgctctcgtgcttctcttccccgtcagcctgcttgttccgctcgaagccgatcataagctgacaccaacgctgcatagctcgggagccggtgaactggctttcctttacctcagcgccctcctcgtgggtacgattacccttgggcgggttaaggtgggagaagatgaagatccgaagacccaactcatcggccatacctgcaagctctgtacagatacgggcgatctccgtgttcatttcggaaggactaagatggttggtcatggcggtcatgttatccagcaggatagtcttcacatccatggctactgcccagaagcgaatacattccttgatatgatcccaatcgttctgacccttgttcttccacatgaagagcttgccacggagtttacccgcagcgtctttaaaggcttgctcatcccactcgatatccggtcggtggaagggtacgttagctaccttccccgcgatattcttcagtgtcatggctacctgctcttccaacaggaatgtccctacgttctccccgtgctcaatgcaattccaggcagcaatctcgtgggccaacagggtcttaccgatgccagtacctccacctaccccgatgatttcaccatcccgctgaccataggttaggttggttaaaccttcccacgggtaactcttgccccacttggggggttccagagcctcagcgtatacctcatcgacagtaacggaacagtccggagacttgaccttgctgccgaaacgtatcatctggtaaacctcatccccccggttacgcataagcatatcattagcgtccttcagaggaagctcgacaaacttacactcggggtatagggcacgtaccttttctactgacttacggccttcgtcgtccgcatcgtggcaatagatgacctcgttgaaccgctcaaggacaccagactccttaaggaacgcaatgtcccgtccagcagaaccaacacccgaggaccagctaatggatgcctgacgaagatgtttccacttctccgggagtttcgactccatgatctgggccacagacatagccgacagttcatcttcgcagatgactaaccgcaggtggcccatatccttatgccgaagggtgttataaccgaaggggtcaacaccacccttggggctaccacgatagtagaaagccttggggtctaggattcggacgttaaacgctcggtactccccatcgcgggtgcgtggatagtaatgctcgataacgtcctcaccattttcttgtgatagaccaacacgtaccccgtatcgttcagcgattgatttgctgatcttccgagtatcgagggctttagttggatactcaaggacttcgttgacttcatggatgatatcctcttcggatttctcccttcgttcaggaaccttgaacccttcttcgagaacttcatagtggccgcaacggttacaactaccgaagcgggtacctttctccttgtctacgaacaagatgaggtgattacctgttttatccccacctttagctcggcaacccggacaagccgtatcaccgatgatctgcttcacttattcctccatctggctcttgagtaccaagctcggtacagcattgacgttacccggcagggtcttgtaaggagttgttacgaaagtaccgtagaccttctccagttcacggagtcgatcctcgatcttcttcagtcgctcccacatgaagcgaataccaacagactcgtcacagtacccaccatagctggtctcgggactatccgaggcctccgggatcttggagacctcgatggaatcttggaggtgtcgttgggaggcgacaaggcccaggatctccttgaggagcatcttctgggcatgtagctcttggtgtccgaaggtgttcggggtatcgcggtagacttctactgctttgtctacggtcatttcattcattatactgctccttgtcgttttgccaggtgtgccttccagtcgccatcttggacgatatccaacgccatgtggctatcctgatggtacaccagggctttgattcgttccccattgattcggaaatccttgagggtacgatcataccaaccaggataaccctccagggcatccaagttctccagcatttcctcccccttctcaccttcggggagttgccagatttcccctacaatgagatcagcgcgggaggcgaaggagaggatggggaagccgccagcggagtacatcagaccccgctcgcaggatacagcattgccgacaaactcggccccttccagaaggtagtggttgtacaaaccagacaggagagtaccataaacgaaaacacgaacagccattagatagtctcctcgaagattttgttgaagcccttgacgtatgcctccagggcgctgccttcagcgtccagacctggggcggtgttgatctccaggacaaaggcccggccagtggcgtgctggaagatgatatctactgcaccgaagtccagtccagccacctggattgcttctgccgccgccgacatagcctgctcagcaccatcacggtccattgcatcgttaaccccgtagacccagccgccagctacgttacgaacgatgctttgtccttcgttggtcaccatttcattggcaacacggcggagcttgacttggagaagtactacttccccacggatcacatgggctcgaaactcggtacgcttaccgacgattccctgggtgaacagttgtgccctggtgataacatccgggatgtgggtgtgaccgtagatgtgtaccgggtagtggccctgtctacggagggcatcgattgcagcaacttctgcatcattgacagtacacaccagatggataccacgaccgctatggccgttcagatcggtacgtgcatacatgcgaccagagatattgagtacacccaaggcatcttcccagcgctcggtccaacggggaatcaagtgaggggcattggcctcgaagtggcggaagaactccagcttgttagcgcagcgataaacaactgccgggtcgttgaggaacacaggggcaatatcccggagtcggtgagcctctgcacctacggtaccccagttgattaccgcagtacccgcacggccacggtaggtagacccctcggaccgaaggattcgggcaccaagggcattgcgaagatttacggcaccggaagaagctcgggaacctttgtagatgtagaacatggcatatctcctgtttctgttgagggtagtagtgaagccagcaataacccctgaattcctaagtcagatcccatgtacacatcttaggaaccggcatgggtcggccaggggttattactaacgcactaccttactcgaagtagtcttcgaagagtcggtcgatagcttccgcaatgactaccggggccggtaccaggaattcctcgtccgggttggcatcattgagttcctgctccttgactcgacgaatcgactggatcttgtccagggtgtcacgggagaaaggatactttcgggttgcgtcggtctccatctggatcactacttgacgcttcatcgttacttgggtcattttgacctcctatttattttcgattacacactcgccacagatgaactcacactcatccaggctaccagtgaacttggcaccttcgtataccgtcagatgacgattacgctggtcatatgcggttggaatcttcccgcaggatgcacacccctgggatacgaagtcccgaaagacatgtacgttgttgaacgtgtgtccctgaaccttcaaggggtagctgatgttggccggaggggtattccccgaggtgccgccgacttgaaccctgggtttagaatgggatttcgtctccgaggagatcgtcccaatcctcaaaaccggggtagtctccccaggagtcggccgatgctttgggtccaggcagcttaccgccagatcctcgacagtaaccttgagatcacggtcttggccgatgaagtaggcattggagatactacctcggaggacggtgtatccgtggactttggagacgttgatgccatgagcttcgatgagaaggttttcttcacgctcgattccagtgacagttccgtactcgcttccgtttgcgtaggcttcgatcttgacaacatcaaaggtgacgagttgccggtgcttgaaggtgctacctgctgcgtcgaggttgttgttgatccggagggtgttccttgcgtacgcatcgccagacgttccatacgacgagcccgcttggctgcctttcgttcccgcttggctgccttggcttcggctgtagtcatcgtagtccgagacaccgacgtagcgactccaccatgccgctgcttgcctttcgctttcggggatgggaaggtcgagaaatgtaaccggagtggtctggggttctgcaccctttcgcactccggcctccgtgaacgggatagttaccaggacttcagccttcagttcagcgatgggagaacgcaggcggatcttagcgttgggtcgctccaggaaaaccttgagcatcccaggctccgatgcccatacgatggtcccggtggtggtaaccgccatgaacagaggacgatcctcgttacggatgaagttcaggctacgttccttggagtcccaccagacaaccgcagcagcaccagagaacttctcctcgaacgtcttcttggcaccgtggttggcaatggtagcgcacagcatgttcgaatccacgttgtacttatcattgccatccagcaggtgcaggccccaggtatctacagtaccgttatgtaccatggtgatgtggtctacctggaaggggtgggcattcccatggtccgtcttgtcgcccatcgtggcgtaacggttgtgacccaggtagatgcgagcccgacccttgtccaggaactccttggtttcaggatcagccaggaagtcgtaggcatctactgcccgcttgtgaattcctacctcgttcttaaccgggtcgatcttggccaaaccggtggcgtgagcaccacggataatatccacggccaggagggatttgagaagagcgatttcgttatcactcgcgttagttgtggcacagaagcctaccaatccacacattgtatttctccttagtacatatctggttcgattgttacgccggtatggcgctgaaggtgctgcgggttatccatgagcagtacgaaggcatcttgaagaacctcttggtcctccagaaggtctcgtacacgcacttggtgaccaatacgacgcagagaggttaccgcagtgatcgctgtatccagtcgaacctgggtacctggcaccattgccaagttgtaccgctctgctgcaccatctagtagtcgtgaggtaatagcgcgagcaaagagcagcctacgatccaaggcccgctggcgctcacgttcctgctcccggagacgacgctgacggttctgttcatcctccagggggtctaccccggatcgaacaaagcccatggttgctaccgcgagagtagcactggcgatccccatttcacgaccacccggagacatttcatagtccggagataccccaaggaagaatacatcacggagattcacctcggagagcaccttgaggaactcttccagcggggtttctgcgtgagccatggcgaaggccttgagacacaacatacgctgcatcaggcctaccatttcctgccgagtagtgagagcatgggccccacggaactcgatggacccgaagttgtgggttacctggaggttcaaggccgaatactttggccaggaggtaagacccaagactttctctcggtcaccttccggggccaggatacggcgaccgaaggtctgggccagccagtcgttgctgaagaacgggatgcagaagttactatcccgacgatacggctggcagtgatcgaagaaaacatcctcgaatgccatgtaggtcaggaccgttcgttcataaaccggccactctacgtcccgcatatccatgtgcaggtgggtggagcaacggaaggtgggggccggaggagtttcctccatcgcactcacaaaggattcaacccgagtgattgccttctggccagaggcgggaccggagaagacatactccataccatcccgcagagagccgtcacccttcagatcccacccgtccacttccggccagttgttgaggccttccagttcgacttcgaacccgaaggaagcaaccgcaggcagttcctcgtgatgttccggggcaatgatctggttcttacggaaccctatctgtgtgccaataactgacatagcaagtcctcctggttcttgaattgttcatctgcggacagtcggccatctaccatctgaccaaccttcacccccttccagtgaactaccccatccttgatgaagaagtcccggtgggatggggcagagatcatttcctcggcctgggtgaagattcggatcatcatttcgccagtgatggcctgttgagcatggttcagcaggatgttcctggggtccacacccttacgctgagtccgattgttcacgaggaaggatacataagtatcacgaaccccacggccaaagacgtcatagtacccactggagggccgcacgctttctacctcgctgtagacaaccccaccgtagtagttactgccgtcagggcgatacacattacccaggagacgaaacccgtcgaattgacggtcgtcaccaatggactcggtatcgtccacgtacactacccgaggctcgccgtcaacccggaagaaggcataggtggaggagtagtacatgttgaagtccccggccaaccgatggcgattattcaggtcattcatacttcacccccagcgcttgaagtgcagctaccgccgcagcgccgtcgttatcgttgatgattcgctggacttcatcgccagatacgatggacttgtactcctccaggaggtgcttggaggtgtaagcctgtactgccatttcatagacccactcggtcaggtctacagagaagatccagaagttcgacaggctacggtactcgccgccgtagggcttatagcgcattgcaccagccttgccgtacagcttcttacgctgggtgtcaccatcgaggatgacagaggctaggcccaggaggtagtcacacatctgcatgacttctcgggtggtagccttggtgactcgctcgatgtggctgaagccgatatggacgtggccgccagcagttcgcagggtcggaggagcatcgttcggcatcacgttctggcgacgggtccagcagttgtagtccggctcgcaaccgaagacgtaagcctggggaccgaagctgcggaggagttcctcgtcgtacaggtgagacgacaggttctcgatgatgttcatgccgaaggggtggagcatctgggcaccaaggagtcgaacggagacgatacgctccacgaactcttccttggtactggccgggtcgatgttgtactccagaagaacgttgtcttcctggacagcaccaccggctacagccaagggttcttccttggttccaccgatgaagccgatgacgctctggggattacggtcgtagccgacgaaaacttcgggatctgcaccgatcagggggattgcgttgttcattgcatgttctccagtttttcgaggatttcggggatgctgtattggctggtgggtacgacctcggacctttcccgacctgggtcacctacgtcaatggtgattggggccatgatggacaggattcggtcattaggtacaccttctagcccgtcgtattcgatcaagcaatcgtccttggtatacccttgccacaactcagcgttgtgatgcttgagcttgtccttgaactcttcgcgagtccgaccatggatgctcttgatatcgaagtaggtgatctccttgtacccacctacgataccatccatgacctcgcttatgtagctgtcgtccacctcccatccgtgactttcgcatccttcccggtattcaccggcagtcaccgggaacatggcaggatagctgtcgcagtgagcagtgcttcctacctgggcacaagccgcgagggtgaggatctctgcattgcatcccaggaccttatcacggttttcctgggtatagcgacgcaatgcgtcacctattgcccacagacgatcgcccattcggagggcacaaatgatggccgatgcgttcttcctgaggtccacccgtacatagactgcctgccggcgtcctgggggagagaagtggtcgggatcactgagattcttgagatcaccagtgtaatcccaccaacgagtaggccagtcgatggaagccgagagaataccaccgtcggtaatcctgttgaccagatcactgttcaggaactccaccagtttaccagaggtattctcgtgggtagacaccaacaggtggccaatcccggtaacccaccggtcgcccccaacggcggaggtctggtcgcaataggacccgaagcagtttgtatgttcggccatcatcttgaccgagtagtggtgtaccacagacccttcggcgttatagtacacattatgggctgcatacattcccatttgatttctccttggttgtcagaagtttttctcgatgaagccttcgagggccagggggatatcccttgagccgagagaccaggtaatttcacccatgatccccagcagtaccaccccgtgtttttcacagtcagaaggagtaagccggaggaatcctcccaactctgtatccacggtgtcgtagggggttttcttgccgaagatggttggctgggggtaaatagttaccacctccaccttgttcagcttaatccccaggtgttctgacttgtagggcttggaccttacccactcacgtccacctggggcattacggttggccacccaacggccgaatcggttgcactcttcggcggactggatatggatatcgcccttcttgatatcctcccaatcactactgaacatgtagttggtgaggggatacccggtgtagccattggctatcagcccgtgaaaggacattgctaggtaagacttccagaagccatacttctcagcaagctccatgtgaatcttttcttcacgaccttgagggtcgagaccactggataccagcttgaagaggaacttcatgatggggtaccaggaatccagggtgtgtaccttggggttgaagtagataccgcagacaccttcctttccgtgatgggtgggggaaatcatttccgtcccgttagaatacttctcgaagggggaatccttggccttgctttcgtaagaccagaagtgaaccttcgggatcttgaaggccttgccgccgatggtgatggtcttgagttcaccttgggtacacttgttgagtacatcgatgaacctcttgcttcggcgggagcagatgaaggtccaaccgtcgagcttatagccgtaggttaccggaccttccatggtaccgaagcaggaggaagaggtcattaccttgagggctttaccctcgcccttcttgggtttcataccgaaggcatacttgatacgggccatttgatttctccttggttgagttagccagcaatacccccaggacaggaatactaggggtattactagcgacctctaagttacttagaaggtgccacggcgctgttgcttgcctttggtcggtgccgacaccttggtggccttgaggttgccgttcagggtcaattcaccgttggagcagagacgctcatagaaaaccttacgcttacccattgttcacctccttagcgaacgttgatgaagggcatggcttggccgccggtaacgtaggtaggcagcttgccgtcccacttctcgatggcattcagttctaccacgccggggttctggcggagggcttcaccctggatgcggaggctttcggccttaccttgagccaccaggatagccgcttgcttctcgccctcggctgccgcgatagccttggctgcctcggcttgggtctgacgcagttcgttctcacgctgcatcgccgtctgggtagccttgatcttggcgttgattgcctcgaccacctgggccgggaggccgatcataccgttgaggtacaggctttcgacgatgatgccacgggtggagaagtgctcacggacggcagcttcgacttccttcacgaaggcttccttgcccggaccatagatggcctcggcggacttcttgctgctggcgttgttcacggcgttacggaccacctgcggtacgttcacgctcacgatctcgttcatgcccttgcggtaggtctggaacagcaggggtgcgctacccggagcagcccggagggtgacgccgatggggaagtccagcttcaggccgtccttgtcctgggcagtcaccaccgccagatcgaagttctggttgaaggtggggaacttgaacagttcttcgttgggagtcaggaacttccagccgaccggggtttccttcagatcgacgcctttggagtcgcccatcatgttgacgacgactccggtatagccagcgggaaccttggagcaacctgcggtgattgcgagagcagcaatggccaggaggccgaggattttcttcatagggattccttacttgtagagaagaggggtgatgtagaccatgcacaaggcaatgaacatgacgaacatcagtacatagaagccccaatcatgcgggggcttacctgggtggcccagcaggccgtctatcttatgtatgttgtcgtagaggtcagaggtatcttcgccgataccctccagatccatgtggattgccttacggaggaggcctcgctgctgttccgtcatagtacatcacaccttcaccttgagagtttcaccctcgggtatcgccacgaaatacacggggggttcccgagggtgtatgtacaggacactcccattgcagatgtttaccatcgggatggtgaggtccttccaggattccgaacgaagatagatctgagaatcgcgcttacgttcgaagtaaagagggatccttggccccttactacttcttgttacagtggccatactacacccccttcttgccagtgagcttaccggcgtaggagtacagatggctgacagcccagagggagtacaggatggaaaggaccaggaggccggcaccgatggcgttaaccatggtgttagcgggggacagcatctggggtactacccagaggatgcttacccatgcggggatagccagaagcattacccgagtgtagagcttgaggaccattgttctcacctctttcttaagatgaagaagatagaaggttagaaccttaggtatcctagggatataaagcaaccccggacaccttaaggttattataccacactttcagcagaatgtcaaggcctagatgttacagacctttacagagcttgtcgaggtattccgagtgctcgacagtaccggggaagtcctgcaaaccaccgagtcggcggatgaggacaccgtggttgatgaggatctccgccgcagcttgcacgttgatgacgtgaacccgaaccttcgtcgagtggttggcgctggaggcccaggggttgtagtggctgcccatgcggcggaggatggtatcggctaccacctgctcgttgttcacggagaacacggcggtgccatgaccttcgttgtactctcgacggatgaccccgatcaattccttggcgaaaccacgggggctgaacccattggacgcaatgcctgcgtagtggtcagcagtacccgaggggcccatgccaatgtaaatcttggcggtgcagcaggaggggaagtcgttgcgttgcattagtaatctcctttgattagtcgcttggttgatccgatgagaataaccagcgggttgtagataacagccatgaagcacatccagggaagcgatgcaggccacagggcacccatcacgattgcaatgtcccggtctctctggcccatcattccattctggtcggctaaaaagagtgcggaaaccccggatatcaaaagggctaccgacatgtaggccaggatcgctgggattattaggaggtacatactcatttgctacggaccaccttacgatgtacgtcaccacagcgatcgcacctcaggtcgtaatagtggcagagttccactaaccgacccttgtggcgaatctcgtagggtccaccatcaagtattttgtaccgatggacacccaataggcaccaaaagttgccgagatccatcaccagtccctcgaacagttgcaacaacggccctctttgggaccgaagactggcatacaatgagggcaaggctcaccagattggatcatggcctccctggcgtggcgcaggtaagccgatcggctcgactccatacctacggcagccaaggtgaaaccaagctcaccacggggctcctgggtgacttcctgatgggtcatgttgaaccctcgtttctctactcgacgcttcattcgccgctcctgggccatgatttggccgatcattggtttactcttcatacggtccccacaccttggcggatacatggacctccttagccgggtagagctccccgatgttgggcatggtctgggcttcgaggatgctgaacccgctctggctgaggacgacaaccttattaccttccttgaggaagacaatatcgccagagtttttagggttcacataaaccccatccgcccgcttactgatgtgaaggtcgttccgggggcgggacgctgctacagtgaaggtagtgtttgtcatgggtcacctcagtggacccgatgaaccttgtggtccaccggaatgccgagttcgtaaagggtttcggtgatgaactggccgaagttgatgaccttcaggtggaattcaccatcgggactggccaaccaatagacttgtggttcagtggatttcatagacgatacctacacgtttgccgaagatagatacacggatgtgggtcacgtaccaaccagggtacgccttggggttaggctggaacctgcggatgctgaccaaggattccaaccagaggaatagatacagggcgggcgtcatagtacacaccctaggccggagggccgaaccgatggacttcgatggacgcagccttgatggtcacggggtagaacccgcagtcaacatcgccgctgaagtatacggcacccacgggcccaccgaagatatccacgatgaagaattcatctgcaacttccatgtacataaagacacgcgggtttgcagccccgtcctcgtcctggcggatgtacagacgacccgactccagatcatcccaagaggcaacccggatcttactggtgagcatattgtattggagtttcatgttacacctcgtagcaattcagctcggcagttactgggtataccaggctcaccggaggcatgtagatgacgttgccagtcttgagattgagaacgggaacctcgtcggattcgcccttcatcttaatgctgcggagttcgcagaccatgtacacatccccaccgatgaggaatgtttgggatttgaccaggttgttgagggttacgccgttgcggggccagattttgatatccattgccatcagctcctgagaaggctataaactaaccatgtcataaacccgagcgttatcatcgtggctatcgccatgtagcagttgaattctttagtggtcctcacctcaactacctcacgatgcaaaaggggtgctgtccaaggtcgaggacaggacgaagagaaccacccacgctaccagcaacaacccattggaacgtgagcgtatggcggcacatgcaatatacttccatgccattaccgcgccctgttcttaaccaaggatgcccgcttggcacggagcttgttcaactccagggttttaccaaggtgattgccgctggagttggtcaactcacgagttaccttagcaatcttgcggtcgatagcctcgatggcttgcatgttgcggctgaccttacgatagtcgttgcgtttcacgggatagtttcctttgttgatttcccaagacgccccagcctgcaaccataggttcggtgggggtttcggccaggaatcaccatggcctcatcagttgggtcagttgatacccatctcttccttccagtcacggaagaagaagtatgcgatgccgatgctggatacgatgatagcgatggtcatttgctaagtttccttatgagttcctggcgctcaacaatccaccggggatcgggatgcacccggatcatcctagtgagtttcttgagacgattaatcatttgggcacgttcatgggccgcttcgtagggtgacttcatttgatccacccgcagatgctcagacggatgccgtccagagtgtagacaccacaagcaaacttaccgtccttgaatgtccagcggtacacaataccagcgtcgaaacctacccttgcatcgcagaaaccagaaacataatcctggccttggatggtatggacctgcccaaagatacagtaacccacggaaacctcctgatggtctatcgctacaatgcacggacctaccatgcactctagggatagacctggggcgcgtcatagtacacaccccaggcgcatccgccgttacgctgccttcgcttcgtccttgacttccagtcgttggatgatagcgatacgctcatccgctgcctggagctggcccttgtcgatggcgcgctgtaccttggccttgaaggcggcgatggccgcgtcgagggagaactcgtcggccacgtcacgctctttcttgtacttgaaccagggtttctcggctgcacgctccagtcgagtaaccttgtccttggcgaagacgaacgggaattccttggccttttccttgtcggtattggccgcgatcttgccgttgtctacgaaccagtgtgccagggccagccgtctggagccttgcggcatcgcgttgaacagcttgcaggccaaggacacctcgccatgctcgtcgatgtgcttgagaatgtccaggccggtagtttgaaccagcttgtccagggcagcaccccggttggcaatggttttgatgatgccgttgatacgcttgtagtcgctcataacttatacctcgggtttgatgtgggtgacgggggagttcttgcacttgctaggcttgtaccaattgcgcagcttagtatcctcgcgattacgccaatcggtattcatcagagcctttcgcttgcgtgctccagccttttcctgaagtgaaacatacttactgtccaggattttgttacaattagaaatgatcccgaacttctgttctgcccgctgctgagctttgccaaggtgcccaatgttcagaccttgggcacgagccttgcgactagccttgcggcgcagcttcttatcgatagcagcgttcatcgtttcatccttttggaatcatcagccgggacacgcatcccgatacgataaaggggttagtcggcaaaccttggcattggcgtagccggcccctttccgcgttagtatcgctgttatggtctgtcctctggctatccttgggagtcttcgtgtctactcgtccctaccttcgccagtatctaccaagcttcgccctctgcgctaagccattgatactaacccaacatactgtccatcacgattccaccatggactctgctaattgtttacgctggagcaggcaaccagtcggatgggtcataaggcagcgaccatcaaagccagcgctctaatcggagtatgcgctattccctcagctttcgggtttctcccctgttcagtccaaggaccgtcgaaggtacactttccccaggtggccgtcacctgatgggtgcccatgttagagccttgggcttggcttgtcaaccccttgacgggggttagttcgtccagttctctggcataggctcttttgctgagcggccatcagtcttgcttgtcaaggctacgctaatccctagggagtcatgcacgttatgccgttgacgtggggcgaactataccgcttcccctaccccttgtcaacccccgatgcctgccggccttacacttgggtgacttgggcgctcttcctgagttggcagcccccggatagcactgcggcaagggggatggtggcctaggtagaacgtgggggccattagacccggttccgcggggtttgtcaagcccctggggtttcccccgttgcctatcggtttccctaaaggcggcgccattacgccatattctttacggggttgtctactggttttttatacagcctgtaggctagtagtcccccagcaaacccccggatatgaacagtctttgactaacatagagcccccggattagtcaataggggatcaaggggttatcaatggatatccccccgatccaccccctgaataccctaagatttttcttatgaatacccttggactaatccgatgaacggtagctcaaggggttgatccccggactagccttatggtatcctggggaggccctaggggctagtacccctgggagagggccacccccactttatctgggggactcctggggggatattccccagatacaccggaggataaaatagacttttggggtacccccggttataggccctggatcaaaggcaacccccgatacctgttggtatattactggataaaggggcaataggccaggacatagcaaacagaggtagtctaggggtatacctatggaacaacctcagggagtacctatagaacctggatcaagggaaccctatgccacttaccccttaccagcaacctacgaagggtagtcttagggtatacctatagaaccctatcataccgttcgtcgggtaaatcatgtgattatcaaagaaatatcaaaaagtacttgacaaggtatcgaaaatgtagtataatagacctataggctcttaagattccttcttccttttgacttacttactaagaaggttagttaccttaaggttatcttaagatagtcttaagaaccccttccccattccagcaaaaaccctaacaaaaccgggccttgcgactaaaataaaaaaaagaagaaaaaagacttgacaaaatagaaaaagtgtgatataatagtattataaggttgagaaattaccttaagatttcattgggatgtagctcagttggtagagcagggagctgttaactctcaggtcgcaggttcgagccctgccgtcccagccaacagaggtcgttgtagaggtagatggctactaccatccggctgtaacccggacgccattggctagaggttcaattccttccttcgaccaccattaactcctcgtagctcagttggttagagtgcctgtcttggacacaggaggtcgtaggttcgagtcctaccggggtgaccatttagagagatcggagcagtgtatgtcagacgaaaaggttgtctcgattggggctgctcctctttctgctaaagaaaagctagacctctattgtgaggctctggcagatggtatgaataaaacccaagcgtatatagccgctgggttctctcctaatcacgctcaacgcaacgttgctgcataccatcgaaagcatgccgaatacatcaacgcctttatctctgagcgcatcgggagtcatgtccccatggcgcttcgtgtggttgtagagattgctagcaacccagaagagaaaggtgggattcgcctcaaggcagcccaggatatcctggaccgtggaggcttcggagctaagcagaaactggagcttactactaagaatgtggaagatatgtccgcagaggatctaatcagtgaagttcgacgaattctcgacgaagagccagagttggctaaagtcatttctttcccaacctcttaagtaccttgatctaatcaagcgaagagaggggttggttctaaagtggtacaaagactcccttgggaaaatgaccggaggttatggtcacttgcaactccctggggaagacggaccgattaccctagcccgagcagagacttggctagagaacgatagtaaggcagcctatgatgcagcccaagggcaagtatctcagctgcctttttgcactccagagctattcgatgccctagttagcgtcaacttccagctgggtacagcgtggacgaagaagttccccaagacgtggaatcttctgaaatccggaaggtttgatgaagctgcatgggaggcagaggatagcctctgggctaaacaaactccagtgcgcgtaagggacctccaacgggccctgtggcgtgcatcaacagtaggtgacaaggtggtctaatggatacccaagagcggctacggaatctagtcagggagttggctgagcggcagaaatacttccgcatgaaccagtacactccttatgggtggcaagagaagtttatcgcagcttcctcgaactgcgcccagctactggctatgactggtaaccgctgtggtaaaacctacaccggggcctttatcatggcctgccacctaaccggtcgataccctgagtggtggactggtagaaaatatgatcgtccagttaactgctgggcggcggggatctccacggataccactcgggatattctccagtccgaactcctaggagactggaagaaccctgaggctttcggaacggggatgatccccaaggaagatatcgtagagacgattcgtagggaaggtaaacccggatgtgtgcaagcagtagttgttaagcatacctccgggggcctctcgtccctcatcttcaagtcctacgaaatgtcccaggacaaattcatgggtactgccatcgacgtcatctggctcgatgaggaatgccccaaagatatttatacccagtgtgtaacccgaacggctactactgggggtattgtatatctgacgtttaccccagagcatggtctcacggagatcgtcaaggacttcctacaggatcttaaacctggtcagttccttgtccatgcaagctgggaagacgccccacacctcagtccagaagttaaagagcagctactctctgtatactctccagcagaacgcaggatgagggccgagggtgtccctatgctcggatctggtgtagtcttccccattctggaagagaagtttgtatgtgagcctttccagatccccgatcacttccataggatcatcggtatcgaccttgggtttgaccaccctaacgctatcgcctgtgtggcctgggaccctgagaaagacaaatactacctctatgatgagaggagtgagagtggtgagacccttgggatgcacgctgatgctatctacctgaagggtggtcaccagatcccggtagttgttccccatgatgcctttaagcacgatggagcaacctctggtcgtagattcgtagaccttcttaaagatgaccacaacctcaatgtagtgtatgagcccttcagtaacccaccgggtcctgatggtaaacacggaggtaactctgtagagttcggcgttaactggatgttgacccgtatggagaatggtgatctgaaggtgtttaatacgtgtacgaacttcctaaaagaaatgaaaatgtaccaccgaaaggacggaaagattatcgacagaaacgacgatatgatctccgctacccggtatgccctgttgatggcttcccggtatgcacgtcctggtgctgtacgaaacagtggatactacaggagtgatactgcaaagttgacccctgattggtttgggagtattgtctaatggctaagcgtcgtcgcaagattaagcctatggatgatgaacaggtacttcgtcatctagaccaacttgttaacgacgcccttgatttcaactcttcggagctttccaagcagcgttctgaggccctgaagtattactttggagagcccttcggtaacgagcgacctgggaagtccgcgattgtatctagggacgttcaagagactgtagactggattatgccttctcttatgaaggtattcacgtcaggcggtcaagtagttaagtatgaacctcagactgccgaagatgttgaacaggcagagcaagagactgagtatgtgaactacctcttcatgcgtaagaacgaggggttcaaggtaatgttcgactggttccaagacactctgatgatgaagaccggtgttgtaaaggtctatgtagaagaggtcctgaaccctaccttcgaacgattctctggcctctctgaggaaatggtagcggatatcctggctgatccagacactgagattctagcccagagtgtggacgaggatggaacctacagcattaagattcgcaaggataagaagaagcgagagattaaagtcacctgcatcaagcctgagaacttcctggttgatcggttggctacctgcattgatgatgcacgcttcctatgtcaccgtgagaagtataccgtaagtgacctgcggctcctgggtgttcccgaagatgtactcgatgagctaccatacgacgagtatgagttctctgatagtcagccagaaaggttggtacgtgacaacttcgatatgacgggtcaactccagtataactctggggatgatgccgaggctaatcgtgaggtatgggcctctgagtgctacacccttctggacgtagatggggatggtatctctgagcttcgccgtattctgtatgtaggcgactatatcatcagcaacgagccttgggattgccgtcctttcgctgatctgaatgcctatcgaattgcccataagttccacgggatgagtgtctacgataagatccgagacattcaagagatccgttcggtactcatgcgcaacatcatggacaacatctaccggactaaccaaggtcgatctgtagtcttggatggtcaggttaacctcgaagacttgctgactaatgaggcagcgggtatcgttcgggttaaggccatgaactctatcatgcctctggagacccctcagttgtctggggaagtctatggtatgctggatcgacttgaggcagacaggggtaagcggacaggtatcactgaccgtacccgaggtctagatcaaaataccctacactctaaccaagcggctatgagtgtgaaccagttgatgactgcggctgagcaacagattgacctgattgcacggatgttcgcagagactggtgttaaacgtttgttccaacttctgcatgaccatgccattaagtaccagaaccaggaagaggtcttccagctacgaggcaagtgggttgctattaaccctgccaactggcgagaaagatccgacctgacggttaccgttggtattggtaacatgaacaaagaccagcagatgctccacctgatgcgtatctgggaaatggcccaggctgtagtcgggggtggtggtctgggggtcctagtctctgagcagaacctttacaatatccttaaggaagtcacagagaacgctgggtacaaagacccggatcgcttctggactaacccggattctcctgaagctcaacgggctaaggccatcagagagcagaaggaagcacaacctaagcctgaagatatcaaagcccaagctgatgcccaacgtgcccaatcggacgccttggctaagcaagcggaggcccagatgaagcaggtagaggctcagatccgactggccgagatcgaactgaagaagcaagaggctgtccttcagcagagagaaatggcccttaaggaagcggaactacaacttgagcgtgatcgtttcacttgggaacgggctcgtaacgaagcggagtatcatcttgaggctactcaggctcgggctgcttatatcggagacggtaaagtacctgagactaagaagccatctaaggcagtgaggaaataatcttgggagaacgttttggctatagtctagtgctgactgatgcggcacaacagatggtacgtgagaacgttcttcctgagcttttccgtattgtccaagaagagatcgagggagagtggaagtccacggcacctaaggattcagaatccagggaggccatctaccacgaactacatgccctcaaccgcgtacaacttcgtattcaggctatcctggattcgatcactctaaaggagtataagtaatggaccttgagaatcaaggcatggatgaattcgaggcagcggaagccttcggagatttgctaggtgatgacctcctggcacccggtgatgaaaccgtggatggtaaagtcgtaggggaagaagaggaggaagaggtagtagacgaaggtactccagaggacaccgaagaggttgagtccgaggaggaagaagagggttctgaggaagatcccgaggttgagtccgaggaagatcctgaggataaactcttcgagatcccgattggggatgaagtctacgaggttaacttcgaagagcttaagagtggctaccttcgcaatgaagagtttgtaactcgacaggctgaactagaggatcagtatgcggctaaattcgaagagcttgatgctgaacgctctaatctactggccgagcttgagcagtacgctgttaccgctattgctggtgctaatcagtatgacaatgtaaactgggagcagcttaaggcccaggatccagagaagtatcaaacccttcgactggaagccctggaagcccgagaccgagcccaggctcttatcaaacgtcgtaacgacattaaggctatgcaagagaagcgagccgagattgtccactctgcctacgttaagcgtcagacagagctagccaagaaacttatcccggaaatgactacggatgagtcttggggtgacaagattgtgtcctacggcaaatcgattggatactccgaggatgagatccgagggatatctgatgcccgccaactggctgtactcgatgcagcacgtaagtgggctgaatctcaggtccgtcgcaaggctgccctagagaagaaggaggagactgaactacctgccgcagttaaacctgctgctcgtagggcggaagcctcagagggttctaagcgggttaaagctgcccgcgctaatctgaggaaagaccagtcggttgaagccgctgctgctctcttctcctctctcgatattttctaatagaaggaaacgtaacttatggcaactccaactaatgccgtctcgactgtagagatcaacggtaagcgcgaagaccttatcgatatcatctacaacatcgcaccctatgacaccccgttcatgactgctatcggcaagggcgtagctaccgctatcacccacgagtggcagactgatgaactccgccagccgggtaagaacacccgagttgaaggtgaggatgcaaccatcaaggctggtagcttcaccaccatgttgaacaactactgccaaatctcggacgagaccctgcaagtcaccggtaccgcagataaggtcaagaaggctggtcgtaagaacgaactggcgtatcagctggctaagaagtcgaaggaactgaagctggacatggaatacgccatggtcggtgcccctcaggctaagatccagcgtaacaccactactccgggtcagatggcaaacatctttgcctactacaagaccaacggttcggtaggtgctaatggtaccctgccaactggtgatggttccgacactggtaccgctggtgacctccgtcttctgaccgaagacatgctcctgaatgcctctgaggctatctggcgcaacggtggtcaggctaactcgatccagacttcgagctcgatcaagaaggccatcagcaagaacatgaagggtcgtgcaactgaaatcaccctggatgcctcggacaaccgcatcgcgcagaccgtggacgtctacgagagtgacttcggtaagtacaccattcgtgccaaccgctggttccacgaaaacaccatgttcatctttgatccgaagatgcacgccctctgctacctgcgtccgttcttccagcatgaactggctaagaccggtgacagcgagaagcgccagctgctggttgagtacaccctgcgtgtaaacaacgagaagtccggtgctctgatccgcgacgttgtagcccaggtctaacccaacggggcccttcggggccctttgtttccccttaggaggtacatcatgagtatccaatcgacttatgcaattgacgaagaccttgggctctttatccgaaaggatactcaagatgttgagtcaatcctgtccgctaacgccgaagagcgccactcgggtgtcaatagcaaccgcaaggataatatgcgcaaggtagcaagtatccccctggttgtcgtagaggcactacggaatcgtcccatggctgaaggtggtcccatcgatcttaatctgattggttgtgacccagatcatgccgcaagatttacccgttggcttaatgaccgagataactatcggatgcggacctctgaggcacgggtgtaatgaatggctacgatcaacaacgtaactgatctcgctattgccgctatccagtggtctgaccgtcaggatcttacccaagaacttctgatgttgttcattgggaacactactgaccgtcttaaccgattgctacgagtgagggagaacgaacacttcgaaactctcatggccttcggtggtggcattgagatccctgagcactttgttgctctaaggtctatcacgggtgactctcttatcggtgggcgtactcttcagtacatcacccaagatatcttcacccactatgttaactacaactaccaacctcagggtgtaacctactacactcggttgggtaacttctggcgagtattccccgttgttcctgacggtgccccgttcattgtgaactactggactgtactcccagagctaagcctcgctaacccaacgacttgggctctgacgaagtatccgcagatttatctctatggtgtccttgagcagatttatctgtacaccatggatgaagctcggtcccagttctggggtcagaaactcgaacgggctgttatggaactccagaacgaggagaatgccgctgacttcgctagcactcgactggcgatcaaagacattgaacgttaaggagcttcagatgcctatctttctaaaaaccctcgcaatcaaccttctggctaccctcttcccaaccaaggtaatcgctaagtccatcgtgactggtgctaaggccctggcggagaagactaactctaaggttgacgacgagttcgtaaaagtcctggaagacaaccttaaggagaagacggaggatgcaacttctaactgataacctgggcagcatcgtcagtgccctggtcgtatcctcggtagtgacggtaggttcctcggttgtcggtcagaatgttcatcaggctctgcttgaaagaaacatccaggccacggagaagctcacccaagcggtgagcgatctccagatttctatggcaatctttggggagcggtatgtcacccgaaaagaaatgaaagaagagataaaggaggccaagaatgggtcttgaggtcgcaacttatattaaccagttggtgcctacgaaccctaccggctctgatctgaagtcctttggggatgaccacctgcgactcattaagagtgctattaagaataccttccccaatatttctcaggctgtcactgtaacggcagcccagctaaacgcagtcgctgatacaacccagtatgttaaacctgggatggttatcatgtgggctgggtcactggctcagatcccagcaggttggaagctttgtaatggtgtagggactacctctaacggaatccctgttcccaacctcattggtgcattcccctggggtatcgacggatcttcccaggctgtaggtactagaggtggtagcgctaacatcgtatgggatgggttcactgaagggactgcccttaccctagcccaaatcccatcgcacacccacacttggagatcccgaggggctactaccctcaccggttctgcgggtgactctggtgctctgacgggtggctctggtaacgcagccaataccaaccttgagactggccctgctggtcaaggtcagactcacaaccatgcagtaaagatcaacatgccgttgggtaatatcccaccgttctgttctgtgttcttcatcattaagaactgaggtatacaatggccctagagagacaagaggtcaagaaccctacggggattgtgaccgatatcgcccccgctgacctgccactggagaaatggtccttcgggaacaacgtccggtttaagaacggcaaggctcagaaggctctgggccatacgcctatctttgatacagcccaggccccaatcttggatatgtttcctttcatccggaataacatcccctattggctcctgtgttctgaacaacggttgtatctagccgacgggactacaatcatcgatgtatccccaggaccttacgctgctagtataactaacagatggtctgtaggatcgttcaacggggtaatctttgctaacgatggggttaaccctcctcatcatcttccaccgtcagaatcaacctttagggtactccctaacttcccagcgaatactacttttaagaggcttaagtcttttaagaacttcctggttggcttaaacgctacaagtaactctgtagaaatgccacagatggtctggtggagtacctcggctgatgctggtggtgtacctgcatcttgggacccaacggaccctactaaggatgctggtcagaacaccttggctgataccaatggtgctatcgtggatggtgtgaagcttcgtgactccttcatcatctacaaggaagactctgtatactccatgcggtatatcggtggattgttcatcttccaattccagcagctgtttaacgacgtaggtatcctcggacccaactgtgcaatagagttcgatggtaaccactttgtagtaggccacggtgacgtatatgtccacaacggtgtgcagaagcagtctgttattgatgctcaggtccgtaagttcttcttctcggatattaaccctgacaactatcaacggaccttcgtacttgcagaccacgtgaatactgaaatgtgggtatgctactcttccactaggtctgagccaggtaagcactgcgacagggctatcatctggaactggaaggaaaacacttggagtatccgagaccttcccaacgttctcagtggagcctacgggatcatcgatcctaaggtgtctaacctctgggatgacgaccccaacccctgggataccgatacttcggtctggggtgaaggatcttataacccagcaaagtccagtatgatcttctcgtctttccaggataagaagttgttcctcttcggtaataactctacattctctggacagaacttcgtcagtacccttgagagatccgatatctatctcggggatgatcgaatgatgaagacagtgagtgccatcattccacacattactggtaacagtacttgtaacatctgggtgggtaacgctcaggtacaaggttctggtattcgatggaaaggcccttacccataccggattggtcaggactataagattgacactaaacatgtgggccggtatatagccttgaagttcgacttctcttcggagggggattggtacttcaatgggtacactattgaaatggccccgaaggcaggtatgcgatgagtcaaaagtacagcccttcgattccaccacaggaagaggaggaactgctgcccttccttaatgatgaattcgttagggttggacagactcttaatgacctagctgacggctactggggggtctctatggagccccctaagaagctcaagccagggactgtaaagtattttgcccccggagtggtaggtccagtatccggcatctatcattacgacttggataaccaatggagactcgcaggtactaaacccaaggacctgccgggggattttatcctatttaccccacagaacaaccatcagccgatgggtacctgtgcctataggatgaacactgctaaggatgaagtatggataaccatgctcatgtctggtggtaactacactaatggagctactgtcctggatcttccccaggcgtattggcctcctgctgagttgtttatcccggcctattccagcattatcccagcgcagagcactattacttatccacctccgtctgaccctaacgcacctccgttggatcaagtctttgatgttctcaacagggctactattcagactggggtggttaaccaagcaatgtttaagatcacagctaatggccgtgttctaatccaaggaattccccaaggagcagtcttcgggggtacattcacattccccctggtggtgactccatgattcatttgattactcgtgagaatatcgatctgcttcctaccgtagtccctgctctggcccgagccttcaacaggacggacctcggtaagttttgggacttcgaacacttggttcactccttggttaattatgaggcctatgtcttctaccaggaagagagtggctacgttggtgtaatccaagtgtcccaagcacccctgggtaatatccttcacttcttctggagtggtaagatgcctgggaatgaaaccccggtagattactcggaggtagacgacttcctcggacagttcgcccaacgagttaactgtcggtttatccaatgcgaaggtcgtcggggctggaagcctaccctagagaaactcgggtacaccgaagactccgtatccttctatcgtgaggtaactccagatgaacttcctccaatttaatgtaaagcgtctgatggggttcgatgtagaggatgccctagactctcgggcttacaagggtggtagcaagaagcaaaagaccacctctgtctctacaccctatcagcaaggtaactataatgaactactctcgggtgccagtgattggctacataacgggggctttgaccccaattacggtggcgatccgaactttgacccggtggctgaccagaatgctctccagcttagtggaatcgaagggttgggtggtctcgggagtgcccttcagtctctcctgggtagctcaggtgttagctctctggctgattaccttggtccttacgatcccaacaaaactggcttggcgaacgccattggtgcagccaacgagcagatgcaatgggacttcgacactacggtacgtccagacctgcgagcaggggccactaatgctggtcagtatgggagttcccgagcgggtgtagcagaaggtattgctaccgctagattgctccagaatcaacagaataacgcctcccagttggctttccaagaccagcaggcttacaaccagaataggttgaataccctgggcaacctctcggctattgctaagggactcggctctggtaatgccatgcaggttgatgctggtagtatgcttcagaatcaggagcagcaggagatcaacggggctctacagaagtgggcctatgagaataacgtcagccttaacgacctactcgcctacaaggagcttatctccggcgacatgggtggaaccaacgttactacctcctcgggtggtggcggtggtggtggcctcgggtctgccctgggtgctctcggtggtgcttccttgggtgctctcttcggtggcccagcgggtgcttctgttggtatgaatgctggtggtagggtcgggggccttctgttctaatggcctcccttcctcagaagctgttcgctataggacagaatataggtggtgggcaggagcgggtacagttgagccgtcaaggttcctaccgccccacccaccttgggacaatgcaatcgggagagtctagtggacaatcaaacccttttggcgcaatgggcggagcagcactcgcggctctcctcgggcaaggaagtgagccttcttcagaaacagtaccaagcttttctgtcgagggggctagaggagcaagcgaacgaggcgcagcggaagttgcagcaggtatgggagcgggagtgggaatccttcctagcgcagaagaactcggtttcggacagcagccaaagtctggaatcctaagtaaactatttggaggttaatcctatggccagcatggcttatgaagggtccccaattcgccctagcatcctccgggctgctcagaatgaactggacatggcgcgaatcgcaaggaacaaactgccgctggctgtagagggctcaggaatccctgatcgtgtccgccgggctgctcaggctgccctagagaaccctgaccgttggtctcgggctgcccaagaggtggcccctgcggctgaggctacgggtcgtggtgccctgggccgtatcgcaggtatcctcggtggtcctatctctgtaggtgtacaagccgctgtaaccccaggagaactcggggatgcagagcgtactcgtgcagaagaaatggctcaggctagccaagcggttgagaacatgggtcccgaggttgctcaagaggcaaaccaatgggcccagggtgtaggccaacgtgcagcccagaacgccacaggaggccctacgggggctgaactcctgtcctatggggtaacccctaaccaaccctctatcgagcctgatatcgctccagaggtggcctctgcggctggtgctgctgtagcagatgaggaggaggctaatcgacaggtcatccaacagggtgcagccgagggtcttcgtactggtgctgtaagtcgtcctgaaatggcccaggctgtagttgaagctgatgcccagagagagggtgtagagctaaaaccccaagagcttaagaatcgggttaacgaagagttgactcagatgaggactatggataatgatgacctgtctcgttatgtatcttatgctctcattggtactggtcttctggcttcggccatagacaagactggtaaagctggggatatgttcgctgcttcctatgagcgtcaactggatcgtaacctacaggctgggatcaaccagcagaagatggctgccgcagctgctgatcgtcagatcaaggaaaaagatctggagcgtaaggtggctaaggatgctgctgatgtacgccttggtgagggcaacctgaaagttaaggaagggacccttgagcaaaccaagcgtaagactgagggcgtccttgataagtgggtcaaccaggctgctgtagatagggctaatctggagttgacccgacgtggccaagacctggctaaccaacgggcccagctacaggctgaaactactcgacgtggccaggacatggcccaagagaatgcccagctaggttctgctgtacgactcaagaccgctaggattagcgctcaggcacgtcaggcagcagctaaggcagcccgaggtgaagctgttactactaaggacgcccttggtatcctgagtgaagtcaatggttctcaggctctgggtggtaagaagctgagtaagactgcccaacaggctattgcccagactgtccgaaatgaacttcgggctaatcctggggctaacccagtgggtattatccagcgggaggctgctaagcttcaacctacgggtaactggtttggtgctgatctggactatcctgccccaacccgataaaaggtacttgacaaagtatccaaaatgtagtataatagacctataggctcttaagattccttcttccttttgacttacttactaagaaggttagtatcctaagatacatcttaagagcctattctctttccagcaactagaaggtgacttatggctctttctccagaactgaaggccgctattgatgcggaactggctgaggtcaagggcctcgacgtagccgctgaattggcttccttgaatgagccagaggttatcgaagaggcaccccaggaagtagcccctgctacccctgagcctgccccagacctgagtgccctagtaactccggctgaccctaattctattagctctgcgattggtcgtggggttgataccatgcagtctaacatcggtggtactattgctacccttggtgaactgactggcagtgactacctgaaagactacggcacacagatggccgaggagaatgctcaggaagcgtcacagtacggaacccctgatgttcggtctttcgctgatatccaagatatcccatccatcgggtcgttccttaagaataatatcgtagaggctctcccttcgatggccccggtacttgctggtggtgccgcaggtgctaaggctggctctgtctttggggcccctggtcgtatgggtggagcgctcattggttccttcctgagttccatgggtatcaacgtaggtgccctgagtaaccagatgaaggaactagaccccgatcaaagcaacccatggaccgcagtcctcggtggtgctggcctctcggtactagacactgcgggtgctggtgttatcgctgccccactcctcaagcacatcggtaaagatggcgcttaccagatgttggtccaatcgggactacctaagcaaaccgctatcgaggctgttacccaggctggtaagcatgcagcagtctctggtgtggctgaaggtgttacctctggtgcccagcaggccctccaggataccatcgcctatgatgcagtagggcaggtacaaaccccagagcagttcatggataacctcctgacggctgcctttactggtacagctatgggtactgctggtggtgctgtatcctctggtttggacaccctgggtcgtcatcaggattcagctggctctgccattgttgatcctaatgctcctgcggcccctcctaaggcgtctgagctagagcctaggggtacggtcaagaaagcctgggatgccctaggaaacgaagctacgtcgctcctagagccactcgccaaggcctctcctatcgctcgtgagttctctgagaccttccgtgctgatatgagtggtaagcgagcctctggtaagaccatctttgaggatcaggaactccaggcaggtaagtggaactccgaacttgataatatctttgagggtaagtcttccaaagagatcgataggattatcgctgatacatccgcaggtgtcaataccccagaagctacccgtctccgtgctttgatggatgacgtaaggaatgaggctgttaaccgtggtgggatgtccgttggtactatcccaaattatatgccattcggtctatccccagagaaggttcagacccccgagttcctgaatgatattactccgtacttccagaaccgtcaagctgctgaagatgctgtagccaactggttggtagaagtctcggatgatactcgtggtaacactgcccctgaggttaaccgactggttactcagaaccagcagaccggggcttgggaagtagaccctcgttatcgtatccaaggtgatccagatactctacgtggacggtttgcccaaagcgatgcagttcctaagtatggtcaactggaagagagccgggcctttggttctgtacctcaggagatcctgaataaatactccctgaacgatactcctaagaagcgtctccaggaaatccgggactacttcgaaggggcttcccaccggattgcctttaccgaacggtttggtatcaacggggagaaggctaacgctaaaattgcatctgctgtagctgaggctcaacgggctggtaagcgggttactaaggaagaggtggatcggatgtatgatctagtggatgcctacaatggtatgcacggtcgtatcaaagatcctaaccttaagaagctagcggctgttacgtcgggtgccctcgtgctctccagacttcccctcgctggcttctcgaccctaaccgagttcagcctaccattcgctaaggctggggttatgcctacccttggggctgtactcccaaccatgggtgaggtagtaaggcaagcagcccgcaggatctacagtgggattccgaagtctgagaccggtcggtttatgagtgatatgaaccacaccctggcctctgctacctctctgatggctgatcgggttggtgctgaggtgtttaactctactatccaaaagacgatccgtggtcagttcctcattaacggcttgtccatcctaacccatgttaaccgagtatttgcaacagagactgccaagagggtctatcagaacaacctgatggatctagccgcagggctccccttcagttctgccaatggtgctctgaaggttgctcagcttcgggaaatgggggttaatatcggtagccagcaggatgccctcaagttgatctccccggctaccccatctgaagtcctgatggctaacaatgtcaagactttggctatgcgtcggtttgtggaccaggtagtcctcgaccccaccttcgctgataagcctatgtggatgagcaacggaaacgttcagatgttctccctcttgaagggttacccagcagcctatggtaacatcatcctaccgatgttccgtagacgactgagcccacacttcgctggttcttggaccaacgctggtatgggtgccgcaggtgtagccttcactcttggtctgatgatgagtctggggtatctccaggatgagcttcgtcagctggctaagttcggtggatctagccgagaggatacccgtagtccagagcaacggatgatggacgtagtgatgcaacagatgccactccaggcttctatgatctacgacatgctaacgggttaccgtcggggaactactcccgcagaggtactcttggggccagtagctggtgctgcaacagagggtgctatggctgttggtaaaactattgcctcgttcggggatgacccttccgcaggtgagatttggaagttcttgtataagcaaact

SEQ ID NO: 31 - DNA, 46622 bp, unidentified
  source 1..46622: mol_type = genomic DNA; note = EPa83
cccccaggagtcccccagataaagtgggggtggccctctcccaggggtactagcccctagggcctccccaggataccataaggctagtccggggatcaaccccttgagctaccgttcatcggattagtccaagggtattcataagaaaaatcttagggtattcagggggtggatcggggggatgatatttctttgataatcacatgatttacccgacgaacggtatgatagggttctataggtataccctaagactacccttcgtaggttgctggtaaggggtaagtggcatagggttcccttgatccaggttctataggtactccctgaggttgttccataggtatacccctagactacctctgtttgctatgtcctggcctattgcccctttatccagtaatataccaacaggtatcgggggttgcctttgatccagggcctataaccgggggtaccccaaaagtctattttatcctccggtgtatctggggaatatccccccaggagtcccccagataaagtgggggtggccctctcccaggggtactagcccctagggcctccccaggataccataaggctagtccggggatcaaccccttgagctaccgttcatcggattagtccaagggtattcataagaaaaatcttagggtattcagggggtggatcggggggatatccattgataaccccttgatcccctattgactaatccgggggctctatgttagtcaaagactgttcatatccgggggtttgctgggggactactagcctacaggctgtataaaaaaccagtagacaaccccgtaaagaatatggcgtaatggcgccgcctttagggaaaccgataggcaacgggggaaaccccaggggcttgacaaaccccgcggaaccgggtctaatggcccccacgttctacctaggccaccatcccccttgccgcagtgctatccgggggctgccaactcaggaagagcgcccaagtcacccaagtgtaaggccggcaggcatcgggggttgacaaggggtaggggaagcggtatagttcgccccacgtcaacggcataacgtgcatgactccctagggattagcgtagccttgacaagcaagactgatggccgctcagcaaaagagcctatgccagagaactggacgaactaacccccgtcaaggggttgacaagccaagcccaaggctctaacatgggcacccatcaggtgacggccacctggggaaagtgtaccttcgacggtccttggactgaacaggggagaaacccgaaagctgagggaatagcgcatactccgattagagcgctggctttgatggtcgctgccttatgacccatccgactggttgcctgctccagcgtaaacaattagcagagtccatggtggaatcgtgatggacagtatgttgggttagtatcaatggcttagcgcagagggcgaagcttggtagatactggcgaaggtagggacgagtagacacgaagactcccaaggatagccagaggacagaccataacagcgatactaacgcggaaaggggccggctacgccaatgccaaggtttgccgactaacccctttatcgtatcgggatgcgtgtcccggctgatgattccaaaaggatgaaacgatgaacgctgctatcgataagaagctgcgccgcaaggctagtcgcaaggctcgtgcccaaggtctgaacattgggcaccttggcaaagctcagcagcgggcagaacagaagttcgggatcatttctaattgtaacaaaatcctggacagtaagtatgtttcacttcaggaaaaggctggagcacgcaagcgaaaggctctgatgaataccgattggcgtaatcgcgaggatactaagctgcgcaattggtacaagcctagcaagtgcaagaactcccccgtcacccacatcaaacccgaggtataagttatgagcgactacaagcgtatcaacggcatcatcaaaaccattgccaaccggggtgctgccctggacaagctggttcaaactaccggcctggacattctcaagcacatcgacgagcatggcgaggtgtccttggcctgcaagctgttcaacgcgatgccgcaaggctccagacggctggccctggcacactggttcgtagacaacggcaagatcgcggccaataccgacaaggaaaaggccaaggaattcccgttcgtcttcgccaaggacaaggttactcgactggagcgtgcagccgagaaaccctggttcaagtacaagaaagagcgtgacgtggccgacgagttctccctcgacgcggccatcgccgccttcaaggccaaggtacagcgcgccatcgacaagggccagctccaggcagcggatgagcgtatcgctatcatccaacgactggaagtcaaggacgaagcgaaggcagcgtaacggcggatgcgcctggggtgtgtactatgacgcgccccaggtctatccctagagtgcatggtaggtccgtgcattgtagcgatagaccatcaggaggtttccgtgggttactgtatctttgggcaggtccataccatccaaggccaggattatgtttctggtttctgcgatgcaagggtaggtttcgacgctggtattgtgtaccgctggacattcaaggacggtaagtttgcttgtggtgtctacactctggacggcatccgtctgagcatctgcgggtggatcaaatgaagtcaccctacgaagcggcccatgaacgtgcccaaatgattaatcgtctcaagaaactcactaggatgatccgggtgcatcccgatccccggtggattgttgagcgccaggaactcataaggaaacttagcaaatgaccatcgctatcatcgtatccagcatcggcatcgcatacttcttcttccgtgactggaaggaagagatgggtatcaactgacccaactgatgaggccatggtgattcctggccgaaacccccaccgaacctatggttgcaggctggggcgtcttgggaaatcaacaaaggaaactatcccgtgaaacgcaacgactatcgtaaggtcagccgcaacatgcaagccatcgaggctatcgaccgcaagattgctaaggtaactcgtgagttgaccaactccagcggcaatcaccttggtaaaaccctggagttgaacaagctccgtgccaagcgggcatccttggttaagaacagggcgcggtaatggcatggaagtatattgcatgtgccgccatacgctcacgttccaatgggttgttgctggtagcgtgggtggttctcttcgtcctgtcctcgaccttggacagcaccccttttgcatcgtgaggtagttgaggtgaggaccactaaagaattcaactgctacatggcgatagccacgatgataacgctcgggtttatgacatggttagtttatagccttctcaggagctgatggcaatggatatcaaaatctggccccgcaacggcgtaaccctcaacaacctggtcaaatcccaaacattcctcatcggtggggatgtgtacatggtctgcgaactccgcagcattaagatgaagggcgaatccgacgaggttcccgttctcaatctcaagactggcaacgtcatctacatgcctccggtgagcctggtatacccagtaactgccgagctgaattgctacgaggtgtaacatgaaactccaatacaatatgctcaccagtaagatccgggttgcctcttgggatgatctggagtcgggtcgtctgtacatccgccaggacgaggacggggctgcaaacccgcgtgtctttatgtacatggaagttgcagatgaattcttcatcgtggatatcttcggtgggcccgtgggtgccgtatacttcagcggcgatgttgactgcgggttctaccccgtgaccatcaaggctgcgtccatcgaagtccatcggttcggccctccggcctagggtgtgtactatgacgcccgccctgtatctattcctctggttggaatccttggtcagcatccgcaggttccagcctaaccccaaggcgtaccctggttggtacgtgacccacatccgtgtatctatcttcggcaaacgtgtaggtatcgtctatgaaatccactgaaccacaagtctattggttggccagtcccgatggtgaattccacctgaaggtcatcaacttcggccagttcatcaccgaaaccctttacgaactcggcattccggtggaccacaaggttcatcgggtccactgaggtgacccatgacaaacactaccttcactgtagcagcgtcccgcccccggaacgaccttcacatcagtaagcgggcggatggggtttatgtgaaccctaaaaactctggcgatattgtcttcctcaaggaaggtaataaggttgtcgtcctcagccagagcgggttcagcatcctcgaagcccagaccatgcccaacatcggggagctctacccggctaaggaggtccatgtatccgccaaggtgtggggaccgtatgaagagtaaaccaatgatcggccaaatcatggcccaggagcggcgaatgaagcgtcgagtagagaaacgagggttcaacatgacccatcaggaagtcacccaggagccccgtggtgagcttggtttcaccttggctgccgtaggtatggagtcgagccgatcggcttacctgcgccacgccagggaggccatgatccaatctggtgagccttgccctcattgtatgccagtcttcggtcccaaagagggccgttgttgcaactgttcgagggactggtgatggatctcggcaacttttggtgcctattgggtgtccatcggtacaaaatacttgatggtggaccctacgagattcgccacaagggtcggttagtggaactctgccactattacgacctgaggtgcgatcgctgtggtgacgtacatcgtaaggtggtccgtagcaaatgagtatgtacctcctaataatcccagcgatcctggcctacatgtcggtagcccttttgatatccggggtttccgcactctttttagccgaccagaatggaatgatgggccagagagaccgggacattgcaatcgtgatgggtgccctgtggcctgcatcgcttccctggatgtgcttcatggctgttatctacaacccgctggttattctcatcggatcaaccaagcgactaatcaaaggagattactaatgcaacgcaacgacttcccctcctgctgcaccgccaagatttacattggcatgggcccctcgggtactgctgaccactacgcaggcattgcgtccaatgggttcagcccccgtggtttcgccaaggaattgatcggggtcatccgtcgagagtacaacgaaggtcatggcaccgccgtgttctccgtgaacaacgagcaggtggtagccgataccatcctccgccgcatgggcagccactacaacccctgggcctccagcgccaaccactcgacgaaggttcgggttcacgtcatcaacgtgcaagctgcggcggagatcctcatcaaccacggtgtcctcatccgccgactcggtggtttgcaggacttccccggtactgtcgagcactcggaatacctcgacaagctctgtaaaggtctgtaacatctaggccttgacattctgctgaaagtgtggtataataaccttaaggtgtccggggttgctttatatccctaggatacctaaggttctaaccttctatcttcttcatcttaagaaagaggtgagaacaatggtcctcaagctctacactcgggtaatgcttctggctatccccgcatgggtaagcatcctctgggtagtaccccagatgctgtcccccgctaacaccatggttaacgccatcggtgccggcctcctggtcctttccatcctgtactccctctgggctgtcagccatctgtactcctacgccggtaagctcactggcaagaagggggtgtagtatggccactgtaacaagaagtagtaaggggccaaggatccctctttacttcgaacgtaagcgcgattctcagatctatcttcgttcggaatcctggaaggacctcaccatcccgatggtaaacatctgcaatgggagtgtcctgtacatacaccctcgggaaccccccgtgtatttcgtggcgatacccgagggtgaaactctcaaggtgaaggtgtgatgtactatgacggaacagcagcgaggcctcctccgtaaggcaatccacatggatctggagggtatcggcgaagatacctctgacctctacgacaacatacataagatagacggcctgctgggccacccaggtaagcccccgcatgattggggcttctatgtactgatgttcgtcatgttcattgccttgtgcatggtctacatcacccctcttctctacaagtaaggaatccctatgaagaaaatcctcggcctcctggccattgctgctctcgcaatcaccgcaggttgctccaaggttcccgctggctataccggagtcgtcgtcaacatgatgggcgactccaaaggcgtcgatctgaaggaaaccccggtcggctggaagttcctgactcccaacgaagaactgttcaagttccccaccttcaaccagaacttcgatctggcggtggtgactgcccaggacaaggacggcctgaagctggacttccccatcggcgtcaccctccgggctgctccgggtagcgcacccctgctgttccagacctaccgcaagggcatgaacgagatcgtgagcgtgaacgtaccgcaggtggtccgtaacgccgtgaacaacgccagcagcaagaagtccgccgaggccatctatggtccgggcaaggaagccttcgtgaaggaagtcgaagctgccgtccgtgagcacttctccacccgtggcatcatcgtcgaaagcctgtacctcaacggtatgatcggcctcccggcccaggtggtcgaggcaatcaacgccaagatcaaggctacccagacggcgatgcagcgtgagaacgaactgcgtcagacccaagccgaggcagccaaggctatcgcggcagccgagggcgagaagcaagcggctatcctggtggctcaaggtaaggccgaaagcctccgcatccagggtgaagccctccgccagaaccccggcgtggtagaactgaatgccatcgagaagtgggacggcaagctgcctacctacgttaccggcggccaagccatgcccttcatcaacgttcgctaaggaggtgaacaatgggtaagcgtaaggttttctatgagcgtctctgctccaacggtgaattgaccctgaacggcaacctcaaggccaccaaggtgtcggcaccgaccaaaggcaagcaacagcgccgtggcaccttctaagtaacttagaggtcgctagtaatacccctagtattcctgtcctgggggtattgctggctaactcaaccaaggagaaatcaaatggcccgtatcaagtatgccttcggtatgaaacccaagaagggcgagggtaaagccctcaaggtaatgacctcttcctcctgcttcggtaccatggaaggtccggtaacctacggctataagctcgacggttggaccttcatctgctcccgccgaagcaagaggttcatcgatgtactcaacaagtgtacccaaggtgaactcaagaccatcaccatcggcggcaaggccttcaagatcccgaaggttcacttctggtcttacgaaagcaaggccaaggattcccccttcgagaagtattctaacgggacggaaatgatttcccccacccatcacggaaaggaaggtgtctgcggtatctacttcaaccccaaggtacacaccctggattcctggtaccccatcatgaagttcctcttcaagctggtatccagtggtctcgaccctcaaggtcgtgaagaaaagattcacatggagcttgctgagaagtatggcttctggaagtcttacctagcaatgtcctttcacgggctgatagccaatggctacaccgggtatcccctcaccaactacatgttcagtagtgattgggaggatatcaagaagggcgatatccatatccagtccgccgaagagtgcaaccgattcggccgttgggtggccaaccgtaatgccccaggtggacgtgagtgggtaaggtccaagccctacaagtcagaacacctggggattaagctgaacaaggtggaggtggtaactatttacccccagccaaccatcttcggcaagaaaaccccctacgacaccgtggatacagagttgggaggattcctccggcttactccttctgactgtgaaaaacacggggtggtactgctggggatcatgggtgaaattacctggtctctcggctcaagggatatccccctggccctcgaaggcttcatcgagaaaaacttctgacaaccaaggagaaatcaaatgggaatgtatgcagcccataatgtgtactataacgccgaagggtctgtggtacaccactactcggtcaagatgatggccgaacatacaaactgcttcgggtcctattgcgaccagacctccgccgttgggggcgaccggtgggttaccgggattggccacctgttggtgtctacccacgagaatacctctggtaaactggtggagttcctgaacagtgatctggtcaacaggattaccgacggtggtattctctcggcttccatcgactggcctactcgttggtgggattacactggtgatctcaagaatctcagtgatcccgaccacttctctcccccaggacgccggcaggcagtctatgtacgggtggacctcaggaagaacgcatcggccatcatttgtgccctccgaatgggcgatcgtctgtgggcaataggtgacgcattgcgtcgctatacccaggaaaaccgtgataaggtcctgggatgcaatgcagagatcctcaccctcgcggcttgtgcccaggtaggaagcactgctcactgcgacagctatcctgccatgttcccggtgactgccggtgaataccgggaaggatgcgaaagtcacggatgggaggtggacgacagctacataagcgaggtcatggatggtatcgtaggtgggtacaaggagatcacctacttcgatatcaagagcatccatggtcggactcgcgaagagttcaaggacaagctcaagcatcacaacgctgagttgtggcaagggtataccaaggacgattgcttgatcgaatacgacgggctagaaggtgtacctaatgaccgaatcctgtccatcatggccccaatcaccattgacgtaggtgacccaggtcgggaaaggtccgaggtcgtacccaccagccaatacagcatccccgaaatcctcgaaaaactggagaacatgcaatgaacaacgcaatccccctgatcggtgcagatcccgaagttttcgtcggctacgaccgtaatccccagagcgtcatcggcttcatcggtggaaccaaggaagaacccttggctgtagccggtggtgctgtccaggaagacaacgttcttctggagtacaacatcgacccggccagtaccaaggaagagttcgtggagcgtatcgtctccgttcgactccttggtgcccagatgctccaccccttcggcatgaacatcatcgagaacctgtcgtctcacctgtacgacgaggaactcctccgcagcttcggtccccaggcttacgtcttcggttgcgagccggactacaactgctggacccgtcgccagaacgtgatgccgaacgatgctcctccgaccctgcgaactgctggcggccacgtccatatcggcttcagccacatcgagcgagtcaccaaggctaccacccgagaagtcatgcagatgtgtgactacctcctgggcctagcctctgtcatcctcgatggtgacacccagcgtaagaagctgtacggcaaggctggtgcaatgcgctataagccctacggcggcgagtaccgtagcctgtcgaacttctggatcttctctgtagacctgaccgagtgggtctatgaaatggcagtacaggcttacacctccaagcacctcctggaggagtacaagtccatcgtatctggcgatgaagtccagcgaatcatcaacgataacgacggcgctgcggcggtagctgcacttcaagcgctgggggtgaagtatgaatgacctgaataatcgccatcggttggccggggacttcaacatgtactactcctccacctatgccttcttccgggttgacggcgagcctcgggtagtgtacgtggacgataccgagtccattggtgacgaccgtcaattcgacgggtttcgtctcctgggtaatgtgtatcgccctgacggcagtaactactacggacatgcaatgaacaacgcaatccccctgatcggtgcagatcccgaagttttcgtcggctacgaccgtaatccccagagcgtcatcggcttcatcggtggaaccaaggaagaacccttggctgtagccggtggtgctgtccaggaagacaacgttcttctggagtacaacatcgacccggccagtaccaaggaagagttcgtggagcgtatcgtctccgttcgactccttggtgcccagatgctccaccccttcggcatgaacatcatcgagaacctgtcgtctcacctgtacgacgaggaactcctccgcagcttcggtccccaggcttacgtcttcggttgcgagccggactacaactgctggacccgtcgccagaacgtgatgccgaacgatgctcctccgaccctgcgaactgctggcggccacgtccatatcggcttcagccacatcgagcgagtcaccaaggctaccacccgagaagtcatgcagatgtgtgactacctcctgggcctagcctctgtcatcctcgatggtgacacccagcgtaagaagctgtacggcaaggctggtgcaatgcgctataagccctacggcggcgagtaccgtagcctgtcgaacttctggatcttctctgtagacctgaccgagtgggtctatgaaatggcagtacaggcttacacctccaagcacctcctggaggagtacaagtccatcgtatctggcgatgaagtccagcgaatcatcaacgataacgacggcgctgcggcggtagctgcacttcaagcgctgggggtgaagtatgaatgacctgaataatcgccatcggttggccggggacttcaacatgtactactcctccacctatgccttcttccgggttgacggcgagcctcgggtagtgtacgtggacgataccgagtccattggtgacgaccgtcaattcgacgggtttcgtctcctgggtaatgtgtatcgccctgacggcagtaactactacggtggggttgtctacagcgaggtagaaagcgtgcggccctccagtgggtactatgacgtctttggccgtggggttcgtgatacttatgtatccttcctcgtgaacaatcggactcagcgtaagggtgtggaccccaggaacatcctgctgaaccatgctcaacaggccatcactggcgaaatgatgatccgaatcttcacccaggccgaggaaatgatctctgccccatcccaccgggacttcttcatcaaggatggggtagttcactggaagggggtgaaggttggtcagatggtagatggccgactgtccgcagatgaacaattcaagaaccaggaggacttgctatgtcagttattggcacacagatagggttccgtaagaaccagatcattgccccggaacatcacgaggaactgcctgcggttgcttccttcgggttcgaagtcgaactggaaggcctcaacaactggccggaagtggacgggtgggatctgaagggtgacggctctctgcgggatggtatggagtatgtcttctccggtcccgcctctggccagaaggcaatcactcgggttgaatcctttgtgagtgcgatggaggaaactcctccggcccccaccttccgttgctccacccacctgcacatggatatgcgggacgtagagtggccggtttatgaacgaacggtcctgacctacatggcattcgaggatgttttcttcgatcactgccagccgtatcgtcgggatagtaacttctgcatcccgttcttcagcaacgactggctggcccagaccttcggtcgccgtatcctggccccggaaggtgaccgagagaaagtcttgggtcttacctcctggccaaagtattcggccttgaacctccaggtaacccacaacttcgggtccatcgagttccgtggggcccatgctctcactactcggcaggaaatggtaggcctgatgcagcgtatgttgtgtctcaaggccttcgccatggctcacgcagaaaccccgctggaagagttcctcaaggtgctctccgaggtgaatctccgtgatgtattcttccttggggtatctccggactatgaaatgtctccgggtggtcgtgaaatggggatcgccagtgctactctcgcggtagcaaccatgggctttgttcgatccggggtagaccccctggaggatgaacagaaccgtcagcgtcgtctccgggagcaggaacgtgagcgccagcgggccttggatcgtaggctgctctttgctcgcgctattacctcacgactactagatggtgcagcagagcggtacaacttggcaatggtgccaggtacccaggttcgactggatacagcgatcactgcggtaacctctctgcgtcgtattggtcaccaagtgcgtgtacgagaccttctggaggaccaagaggttcttcaagatgccttcgtactgctcatggataacccgcagcaccttcagcgccataccggcgtaacaatcgaaccagatatgtactaaggagaaatacaatgtgtggattggtaggcttctgtgccacaactaacgcgagtgataacgaaatcgctcttctcaaatccctcctggccgtggatattatccgtggtgctcacgccaccggtttggccaagatcgacccggttaagaacgaggtaggaattcacaagcgggcagtagatgcctacgacttcctggctgatcctgaaaccaaggagttcctggacaagggtcgggctcgcatctacctgggtcacaaccgttacgccacgatgggcgacaagacggaccatgggaatgcccaccccttccaggtagaccacatcaccatggtacataacggtactgtagatacctggggcctgcacctgctggatggcaatgataagtacaacgtggattcgaacatgctgtgcgctaccattgccaaccacggtgccaagaagacgttcgaggagaagttctctggtgctgctgcggttgtctggtgggactccaaggaacgtagcctgaacttcatccgtaacgaggatcgtcctctgttcatggcggttaccaccaccgggaccatcgtatgggcatcggagcctgggatgctcaaggttttcctggagcgacccaacgctaagatccgcctgcgttctcccatcgctgaactgaaggctgaagtcctggtaactatcccgttcacggaggccggagtgcgaaagggtgcagaaccccagaccactccggttacatttctcgaccttcccatccccgaaagcgaaaggcaagcagcggcatggtggagtcgctacgtcggtgtctcggactacgatgactacagccgaagccaaggcagccaagcgggaacgaaaggcagccaagcgggctcgtcgtatggaacgtctggcgatgcgtacgcaaggaacaccctccggatcaacaacaacctcgacgcagcaggtagcaccttcaagcaccggcaactcgtcacctttgatgttgtcaagatcgaagcctacgcaaacggaagcgagtacggaactgtcactggaatcgagcgtgaagaaaaccttctcatcgaagctcatggcatcaacgtctccaaagtccacggatacaccgtcctccgaggtagtatctccaatgcctacttcatcggccaagaccgtgatctcaaggttactgtcgaggatctggcggtaagctgcctggacccaaagcatcggccgactcctggggagactaccccggttttgaggattgggacgatctcctcggagacgaaatcccattctaaacccagggttcaagtcggcggcacctcggggaatacccctccggccaacatcagctaccccttgaaggttcagggacacacgttcaacaacgtacatgtctttcgggacttcgtatcccaggggtgtgcatcctgcgggaagattccaaccgcatatgaccagcgtaatcgtcatctgacggtatacgaaggtgccaagttcactggtagcctggatgagtgtgagttcatctgtggcgagtgtgtaatcgaaaataaataggaggtcaaaatgacccaagtaacgatgaagcgtcaagtagtgatccagatggagaccgacgcaacccgaaagtatcctttctcccgtgacaccctggacaagatccagtcgattcgtcgagtcaaggagcaggaactcaatgatgccaacccggacgaggaattcctggtaccggccccggtagtcattgcggaagctatcgaccgactcttcgaagactacttcgagtaaggtagtgcgttagtaataacccctggccgacccatgccggttcctaagatgtgtacatgggatctgacttaggaattcaggggttattgctggcttcactactaccctcaacagaaacaggagatatgccatgttctacatctacaaaggttcccgagcttcttccggtgccgtaaatcttcgcaatgcccttggtgcccgaatccttcggtccgaggggtctacctaccgtggccgtgcgggtactgcggtaatcaactggggtaccgtaggtgcagaggctcaccgactccgggatattgcccctgtgttcctcaacgacccggcagttgtttatcgctgcgctaacaagctggagttcttccgccacttcgaggccaatgcccctcacttgattccccgctggaccgagcgctgggaagatgccttgggtgtactcaatatctctggtcgcatgtatgcacgtaccgatctgaacggccatagcggtcgtggtatccatctggtgtgtactgtcaatgatgcagaagttgctgcaatcgatgccctccgtagacagggccactacccggtacacatctacggtcacacccacatcccggatgttatcaccagggcacaactgttcacccagggaatcgtcggtaagcgtaccgagtttcgagcccatgtgatccgtggggaagtagtacttctccaagtcaagctccgccgtgttgccaatgaaatggtgaccaacgaaggacaaagcatcgttcgtaacgtagctggcggctgggtctacggggttaacgatgcaatggaccgtgatggtgctgagcaggctatgtcggcggcggcagaagcaatccaggtggctggactggacttcggtgcagtagatatcatcttccagcacgccactggccgggcctttgtcctggagatcaacaccgccccaggtctggacgctgaaggcagcgccctggaggcatacgtcaagggcttcaacaaaatcttcgaggagactatctaatggctgttcgtgttttcgtttatggtactctcctgtctggtttgtacaaccactaccttctggaaggggccgagtttgtcggcaatgctgtatcctgcgagcggggtctgatgtactccgctggcggcttccccatcctctccttcgcctcccgcgctgatctcattgtaggggaaatctggcaactccccgaaggtgagaagggggaggaaatgctggagaacttggatgccctggagggttatcctggttggtatgatcgtaccctcaaggatttccgaatcaatggggaacgaatcaaagccctggtgtaccatcaggatagccacatggcgttggatatcgtccaagatggcgactggaaggcacacctggcaaaacgacaaggagcagtataatgaatgaaatgaccgtagacaaagcagtagaagtctaccgcgataccccgaacaccttcggacaccaagagctacatgcccagaagatgctcctcaaggagatcctgggccttgtcgcctcccaacgacacctccaagattccatcgaggtctccaagatcccggaggcctcggatagtcccgagaccagctatggtgggtactgtgacgagtctgttggtattcgcttcatgtgggagcgactgaagaagatcgaggatcgactccgtgaactggagaaggtctacggtactttcgtaacaactccttacaagaccctgccgggtaacgtcaatgctgtaccgagcttggtactcaagagccagatggaggaataagtgaagcagatcatcggtgatacggcttgtccgggttgccgagctaaaggtggggataaaacaggtaatcacctcatcttgttcgtagacaaggagaaaggtacccgcttcggtagttgtaaccgttgcggccactatgaagttctcgaagaagggttcaaggttcctgaacgaagggagaaatccgaagaggatatcatccatgaagtcaacgaagtccttgagtatccaactaaagccctcgatactcggaagatcagcaaatcaatcgctgaacgatacggggtacgtgttggtctatcacaagaaaatggtgaggacgttatcgagcattactatccacgcacccgcgatggggagtaccgagcgtttaacgtccgaatcctagaccccaaggctttctactatcgtggtagccccaagggtggtgttgaccccttcggttataacacccttcggcataaggatatgggccacctgcggttagtcatctgcgaagatgaactgtcggctatgtctgtggcccagatcatggagtcgaaactcccggagaagtggaaacatcttcgtcaggcatccattagctggtcctcgggtgttggttctgctggacgggacattgcgttccttaaggagtctggtgtccttgagcggttcaacgaggtcatctattgccacgatgcggacgacgaaggccgtaagtcagtagaaaaggtacgtgccctataccccgagtgtaagtttgtcgagcttcctctgaaggacgctaatgatatgcttatgcgtaaccggggggatgaggtttaccagatgatacgtttcggcagcaaggtcaagtctccggactgttccgttactgtcgatgaggtatacgctgaggctctggaaccccccaagtggggcaagagttacccgtgggaaggtttaaccaacctaacctatggtcagcgggatggtgaaatcatcggggtaggtggaggtactggcatcggtaagaccctgttggcccacgagattgctgcctggaattgcattgagcacggggagaacgtagggacattcctgttggaagagcaggtagccatgacactgaagaatatcgcggggaaggtagctaacgtacccttccaccgaccggatatcgagtgggatgagcaagcctttaaagacgctgcgggtaaactccgtggcaagctcttcatgtggaagaacaagggtcagaacgattgggatcatatcaaggaatgtattcgcttctgggcagtagccatggatgtgaagactatcctgctggataacatgaccgccatgaccaaccatcttagtccttccgaaatgaacacggagatcgcccgtatctgtacagagcttgcaggtatggccgatgagttgggtcttcggatcttcatcttctcccaccttaacccgcccaagggtaatcgtacccacgaggagggcgctgaggtaaaggaaagccagttcaccggctcccgagctatgcagcgttggtgtcagcttatgatcggcttcgagcggaacaagcaggctgacggggaagagaagcacgagagcagaatccgtgtaatcaaggacaggaactacggtaatactggcctagtgtttaccaagtataacccagagacgggtcgcttggttgaacgtgagggcagttacgacgaggtacctgctgacgatgacaccccaatttgattacgttatctatgacctagagggggacggcctcttcaatacggtcacaaggctttggtgcgctgttgttgtagacattccgactggggtagtccggggattccggcccgaggaaatggatgtgttctataggatcatcgcccatgcaaagttcgtagtcggtcacaacatccttgactacgacaaccgggtccttgagaaacttcatgggattatcatacccccagatcgaagctatgacaccttggttgcatcgaggttgacttggccagataggccccagggtcattccctgggagcctggggtaagttcctgaagtgtcacaagggtgatttcaacgacttctccaagttctcagaggaaatgtttgagtattgccttcaggatggagtggtcagtcacgcactgttcaactacctcctccgggtactcggcatgacttggcaagagcttgttgaatggaggactgtagattggctaaaaagcgagtgaggaactacaagcgtgagagagaactggctattcgacgcggcgaaacgggcgtgggctctaagtcaggagatgctcagcgacaccgagcccgccgaaaggtggaaaagcgtcttggcaggaagctcggaaccgacgaggttgtcgatcatatcaaacgtgttaaagatggtggcggtaacggggattctaaccttcgcgtccgtggccgttcttctaacgctgctgatggtggtcgggtgggcgatcgtaaagccaaaggcattcgcaagaaaaagtaaatgaagaggggccttcgggcccccgaggactcactatgttcaatcgaaagcttagcatcagcaacatcctcagttccttcgacaaggtgctggttaacctgaagacctttatccaagagtcttcggaggaatctgaacggatctacaacgagatcagtctcctgaaggcggagcgtacccaggtcatgcaggacaatctgaaggcccagaaggtactggctaatctggaagaactgctgggaggtaagagtgaagaagtatcgagttaacgtggggttccaggacaccaaggtgttcaacgcagacttctaccgaatcgagttggatatcatcagattcttcgctggtgattccgatgccaaccccatgaccgtccgagctaacgagatcggtgctgtccgcggatgggtttctgtagaggagatcaatgatgaccagtaagaaggaaagcctggaagagcaggcgcttaaggagatcgccctggagaaggaattctctggtagctggggtggccccgagatcgacgctgatgacttccccttgggtagtgcctgcggcctagaccccgaggtgtgtgagtcatgtcaataaccctacaagtcctagtcatcttctggagtgcattcttccaggtatttctcctgggtctgaactctaaactccttcgggatgataagatcaaggctgggtttgtagtatcttggtgtatcacgctggctcagtttgcttacatcaaggcggtagcctcctcccacttggagatcggatggtttatcttcgtgtccgggtggggaggtgcccttgggattacctctgctcaatacttctacaggtggtacgacaaagtattccacaagaaggcttgacaaatccagaaaagtgtggtataataaccttaaggtgtccggggttgctttacccctataggagatacaaatgagtgaccatgtaagctattccaaacatgtccgtggtaagtacctgtgtaatatggcctctgccctccataagagtatggagatacaaaggactaacatccggaagttcctcagcagtccccaaattacccttcgggagaagcgtcgggtattcctgagcctccccgctggattcctgggggtgagctacttctcaggctcccacctggatctgagttcctactcgcctaaacgcaatagccgggtacgggagaaggatctgagcctgtacgacgacttctacatcgacaggaatacccagctagatccgcgagacctcttgtttacctcccaagaagagaagaaatgggagtttaaatacctgaaggagaagcggggtgatgggttcgagctatccgatgaagaactgagcgacgttaaggatatccagcgcaagattgacctgtcctggtacctggtagacctggcctgtgagcgtgggtgttcctacttcattttcgactggtgattacatgagcaagatcaagagtattctcatggagcggatagatgacttcctgctcaaacaagttgctgtagccttcctggagcagcaatggaagttggaccgcagtggtaccgtggactacctctcctacctggagggtgtatcccacgaagctgtggagacagttgtagagaatctggcggagcgtcttaagggggattaagtggattggagaaagtcactgttcgttgagcacaaggtagctgatatcatcagccgccagagtaaacgtggagtctacttccagactcagcgggccaagtggctgatccatgtgcttagcgaacgaatcctcaagattgaccttgaggctgtcccccagatgcccatgatgatcgtaagggctggggccttcagcaagccattcctaaagagtggtaagccgaaccaaaggctccagtccctgtggcaacgtcttgggcacttcgaggtatctggtcccttctctgcaatcgagtatgtacccttcgaccttggtaagactgccaagttcaaggactggatgctggatcagggatggatacctgaccaatggaacatcaaggatattactgtcggcactgatggcaagaagctacgtggatctgaccttaatgaatccttgaataagtacattgaggatctccgacagagcaaatctggacgactccgaatgaagctccaggggatcatccctgggaaaactaccattggggaagtcaagagaaagctcgaaaagcaacgtaaggtcctaacgactccgaagatgactgaagagtcgatggataccgtccagggagacctgggcaagctggtgatgcagcgaatggtttgggcccaccgtcggtccctcttgcaggggctggtagatcaggtgaggcctgatggacgcctagaggggagtgctaacccctgtgcaacacctacgggccgcatgaggcaccgtgtagtagtcaatatccccgctgctcgttctcctttcggacctgaaatccgagggttgttccaggggacacctgaggctggtgaatggaaatggactgtcctccgccgtgatcttggggagaacgaaagggttaggcccttcactaacatcgtggaggaactcaagaagggtaagtggaagactgtaggaaagtaccgggtatacgtcccagcgaatcaattggtattcgtgggctacgatggtgctggtctagagcttcggatgcttgcatcctacatcaacaacccagagtacaccaaagaggtggtcgagggtgatgtacacacggccaaccagatagccgcagggcttcccacacgggacgatgctaagacgttcatctacgccttcatctacggtgctggggatgccaagattgggactatcattggaggcaccagggcagacggggctagactccgggcccagttccttgaggctaaccctgaccttgctgcactgattgagagggttaagcaggaagccgagagaggttatctcgaagggctagacggacgaaagctaaccatgcgacgttctgagtctggcgacgtgatgatccataaggcattgaacaccctcctgcaagcagcaggtgctattgtcatgaagtgggcaatggtactcctggatgagcgagtccgcaggttaaacctgagggcttggaaagtcctggatatccatgatgaaggtcagtgggaatgccacccagaggatctcattgctctacgtggacagatggaaatctgtgtccgggacgctggagttctcctcggggttaactgtcctttggctagtgattccatcgctggtcgctcgtggtatgacacacactgatacatctgggggttgactttcagccccctttgtggtataataccttcttccctacgagaggtttaagatatgtctaagaaagtatcccaacgattcaccttcccggtagcgaagctgatcttcccctacatcgtaactccggacaccgagtacggtgaagtctaccaagtaaccatctgcattccgaccaaggaagaggccgacaagctggtacagcagatggaatccaaagatgcccgtctgaagggtaccatcaaataccaagagcgtgatggcgagtacctgttcaaggtcaagcagaagaagcacgttgattggatgcaggatggcgagcgtaaatctgctgtaatgaagccggtggttctgacctcggataacaagccgtatgacggccccaacccgtggggtggttctactggcgaggttggtatcctgatcgagactcagaagggtccgcgaggtaagggtactatgacggccctgcgcctccgtggtgtacgactccacgagatcgtatccggtggtgacggtgaggatgatccgctgttcggtggtgccttcaccgaggaagagcccgaggatgtattcgacgaggtattcgatgacgaagacgctcctatctaagggcttggaggatcacgaggcgggggtatgccggtcaggctgcccctactgcttaattgaattcgagagagtgtggggtgtacgggtggtgagttctacagctgcatctaataataaagtagaggtcgatcctaatggaatcaaacctggtgagccgggcgctaagctcgatagcggcaaggtggatgttggaatcatcttcgaagcgttcccgagggctctatatgcagtggcacaagttgctaacttcggagccagcaaatatagtcgcgggggttggaggtctgtcgagaacggagtccagcgatatgacgctgccttcgggagacacctccttgagcgacacaagggtgaagctttggacccccaaagtaaactaccccaccggtatcacgaagtgtggaacgccctagcgtccctggaactcgtcattcagcaagaggaggaatccaatggaacttctgttggacccaagggctaagactgttcctagcaactactctgtgattggcgtcgatgtagacctggggcttcccccaggctacagcctaacggaggaagctatggacaaagccaagcgtcaagagagcgagtattacgactggaaggggtatgaagcactggccaatccagtggtagagcacccagagtaccgagccaagggtgaagcctttgccctccgtgtcttctgggaagagaagctcaaagaatcccaggtcgtagaagaggtagcgtgatgatagctggtatcgatggtgacgttcttaggtatgagctaggccacgtggctatgtcgaaggaacacatcttcgatatccaggtggagaagccatggcctgaggaagaggtccataagctcgtcgatgataaagtcgaacaaattatcaaaagggtaaatgcagatgagtgtgaaatctaccttactggccaaggaaattttaggctggagcttgcgaaaatcaagcaatataagggtactcgaatcggtcttgaaaagcctcatcactgggaaaccgtgtcgtcccgacttaaggataagtggggagcaatcactttccacggtatcgaggctgatgactggctcggaattcgagggactgaagagggagataactttacagcgtgttctagagacaaggatatccgccaagtcccaggatgctaccattacagttggccctgtggagattcccagccggagttgggaccatttcaagtcgatggccttggaacagtctccgcttcttggcgaatgtatggtgttaagaaaccgcagaagtcatggaaacttgagggcaacggtacggcattcctctacgggcaactccttgttggtgactccgtggataacataccaggcctcccagggacgggaccaaagacagcggcagatttgcttggggagctttctactgagagggatctcttcgcagcttgcgcttacgcctaccaacagaagtacggagataattggaaggagtaccttgtggaaaactttcgtctcctctacctcattcgcgaccgctcttggcttgatattcagcagtccggtaacgagtatcactgctcactgaagaaacattgggagatcccctatgacgacgaagatttattctattgatgaggccctgtctatctgtgagggtctcttcaaaatcctagagactactggcttcactgactacaaggtagctggtggtttcctccgggatgcagacaacggggtagcacccaaggatatcgacctgtatgtacgcaggcctcgtgtagaagacccacgtagacgagtctcacgtgtctttgggcctcagatggtcccttgtgatgatgatgccctagaggtagaagtcatccggttctacaacaagctgggtcacaagaaggttcgtactgggtccggggaactacgcaatgggtatcccgaagggttttctgtgtgggagtccattggtgttgaccttccggtgaacttggtcgtatccactgacagtcacccagcagagttcgacatgggcatatgtgaaatctcctgttggcctactggtacccttcgtcgtgaccgtagtggagaaatctaccggtccagggcatatgagtgggacaaggagaataagtgcatcaccatcaatcgtatggttgatccgttgctggagagtggaaacgcggtcaccgttggccagatcgagaagctcgttaaccacgtaaagagggtgaaggctaagtacccaggccaccgagtgtgcattggggactggatttggatgcttctgcgttcacgttcagtctacgcagggggcgcaatggactttatagtaaggcttcaagaggagggtctaattggcaaagcagggcaggttcttcagaccgaaactgaagtcattgattgggacgaagtacgacagcgaaaccgagaagatcgtccacgagacgatgccttggatgcagttcaaaccgtccccggtaccatacgtcatacagcacaagtacaagccagacttcaaggtatcgacctcgcaaccctgtggatcgacgaagcacctgttggtcgaggtcaaggggtacttccaagaggcgtctgaggcatctaagtatatctgggtgagggaggcacttcccccggatactgaacttgtgttcatctttgagcggcctaatacggcttgccattggctcagtaagcgtaaagatggcacaaagcaaactatggcggaatgggccgaacgtaacggcttccgctggtttactctagagactttcaaggagtccttccctaatgagtaagaagtacaatgaagacactctcgttatcgcggacactcaagttcgatccgaggttaacatcgaccacattggtaacctcggggagtggatcgcacgtaaccgccccaagcgaattgttcatattggggaccattgggacatgcccagtctgtcaagctacgaccgtggtaccgctaagatcgaaggccgtcgagtcctcgctgacatacaagctggtaatgatgcgatgcgagttctgctcgatcctcttcgccgcctacagcagcatcaggcgagttgtaagaagagagtctaccgaccagaaatgcacttcttcatcggtaaccacgaggagcgtatcaagcggtatgaaaactctaaccctgctctccaaggttttattgggtacgatcattttgatctgtccgattggattgtccatgatttcctcgacgtgggtgttatcgaaggtgtcgccttcgcccactacttctacaatcccaacagtggtcgtccatacggcgggagtgccgagcatcgcctcaataagatcaagcgcagcttcgtccaaggccatgagcaagggttcaagtaccacatcgaggcagtaggcaagaagcgaatccacgggcttgtagtcggtagcttctacacccacgatgaatcctacaagggtcctcagggtaacgaccattggcgaggtgtagccctcctccggaaccacaaggatggagagtacgacctcaaactgatgagcgtggaggagttcctgtgagtaagttcttgccagacctgtactacattaagtctgagcatgacttcggtcaacgggggttggcgtttaagacgccgatctccgcagaactctggctggatatgaagtttggtaaagggggtgcagaggaggggcttaagcgtgggatgtataccatcgaagtcctggagatcctctacatccccagtgttcaccttccgaatatcttggggtaagctatgaaagatcgagttggacgtaagctagaggtaggggacagtgtagtcttcctggtccacaggaacacctcctcccatctagccattggcaccgtcgatgggtttacccccaagatgattcggatcaaatgccagaccatgagttggactattgacgctgagtatgttctcaggagcagtgacaaggtggtgtactatgacaaaggctgaactggagaaagcacttgaagagacgcaaagcgctcttgcgaaggctgaggcgaaggccttttcctttgaagaactggctgaagaagctaaaagacagattgaattcctcgaagggatgctagacctagtagaccttagggcttctgtattctacggagattggaggggttatgcagaaagatcaaaagggtaagggtggattcccttggacctacattgcggtagcagccttgtttgccctgctggtttatgtaggatatagctgactgatgttactcctgaccctgggagaaatatccagactcctcatcgatgtattatcttgggcaggttcactgtaggtatccatcgagtaaccaaaaaaaggccccaagggtatcatcccaaggggccttatctttagctccggagagcgttcagcagtgtgttgaacttatccacgagtgcctcgtgagtatccgtataggaagccacggggatctcagatatcttatcctggatggaagccgcaatggcttcatataggccactcacttcgctagccttaggcttccagttacctggtttagcctcactagccttagcacccacctccagaagcttaggcttcccctcaatatcctcccacttcactggctcaaagtctttcgggccaatgacttgtcggagggtcccatcctcattacgaacagcaatagccttcgattgaataacgaatacactgttgccgtagttgtcagcgatataacctgccataatctaactcctaattaagctgccgatttgaaggtacccactgtaccaccgaaaggatacactcggacagtgcattccccaaattgaccatcagtctccgtctgattacccttagcataccaagccttgtccggagatacagcgaacttgatcttagctgtagacccttggataaagtggaagtgacaacctggggttacatctggaccaagagtcacggtgatatccgtggtcccttgagacatgaagaaccaaccagactgctgcttagtcagggtaatgttctgagtaagctgctgggtgttgacgacattaccaccaaggtgagtagtcacgaggcgggggtccaggtagttctgttggagagaaccaatgttcttcacaggaccacgcatgtcatcaaactgctcgataatgtaatccccaatagtaccaccgttctggtcatccgggccaatcacatgcttaatagccacgtaaacacccaggtgttcccgacggggatctactcggaattcactaccgaaggcagtaccgcaaggtgcctcaatcatagtctccgagaagaggccaatcacgtggccagggtcacggttaccacccgaggtttcaccaggagcacccacaagggtgttgaccaggacagaggggataacggcctctgaggggttctccgggaaggaggctgtaacgttctctactaccagggctgcgttctccttaactgcataatagtcagggaggaactctgtagcggtaacgatgttagtatttacccgaccggcatccgaggtaatctcaatgagatcaccatcggcattacgtcggaagacttttggcacatcaaccacgtaggcacggccaccaggaccagcggcatcagtttctacataagttgccatattacttctccttaaagatccagagcatcttccatcgcttccataccggcaacgaaaggacgtgctggagtttgcttatacaagaacttccagatttcacctgcggatgggtcatccccaaacgaagcgatagttttaccaacagccatagcaccctcagttgcagcaccagctactggacccaatagtacctctgcgggggtagtccctcggcggtaacccgttagcatgtcgtagatcatagaagcctggagtggcatctgttgcatcactacgtccatcatccgttgttctggactacgggtatcctctcggctagacccaccgaacttagccagttgacgaagctcatcctggagataccccaggctcatcatcagaccaagagtgaaggctacacctgcggcacccataccagcgttggtccaagaaccagcgaagtgtgggctcagtcgtctacggaacatcggtaggatgatgttaccataggctgctgggtaacccttcaagagggagaacatctgaacgtttccgttgctcatccacataggcttatcagcgaaggtggggtcgaggactacctgatctacaaaccgacgcatggccaaggtcttaacgttgttagccatcaggacttcagatggggtagccggggagatcaacttgagggcatcctgctggctacctatgttaacccccatttcccgaagctgagcaaccttcagagcgccattggcagaactaaaggggagccctgcggctagatccatcaggttgttctgatagaccctcttggcagtctctgttgcaaatactcggttaacatgggttaggatggacaagccgttaatgaggaactgaccacggatcgtcttttggatagtagagttaaacacctcagcaccaacccgatcagccatcagagaggtagcagaggccagggtgtggttcatatcactcataaaccgaccggtctcagacttcggaatcccactgtagatcctgcgggctgcttgccttactacctcacccatggttgggagtacagccccaagggtaggcataaccccagccttagcgaattgtaggctgaactcggttagggtcgagaagccggcgaggggaagtctggagagcacgagggcacccgacgtaacagccgctagcttcttaaggttaggatctttgatacgaccgtgcataccattgtaggcatccactagatcatacatccgatccacctcttccttagtaacccgcttaccagcccgttgagcctcagctacagcagatgcaattttagcgttagccttctccccgttgataccaaaccgttcggtaaaggcaatccggtgggaagccccttcgaagtagtcccggatttcctggagacgcttcttaggagtatcgttcagggagtatttattcaggatctcctgaggtacagaaccaaaggcccggctctcttccagttgaccatacttaggaactgcatcgctttgggcaaaccgtccacgtagagtatctggatcaccttggatacgataacgagggtctacttcccaagccccggtctgctggttctgagtaaccagtcggttaacctcaggggcagtgttaccacgagtatcatccgagacttctaccaaccagttggctacagcatcttcagcagcttgacggttctggaagtacggagtaatatcattcaggaactcgggggtctgaaccttctctggggatagaccgaatggcatataatttgggatagtaccaacggacatcccaccacggttaacagcctcattccttacgtcatccatcaaagcacggagacgggtagcttctggggtattgacacctgcggatgtatcagcgataatcctatcgatctctttggaagacttaccctcaaagatattatcaagttcggagttccacttacctgcctggagttcctgatcctcaaagatggtcttaccagaggctcgcttaccactcatatcagcacggaaggtctcagagaactcacgagcgataggagaggccttggcgagtggctctaggagcgacgtagcttcgtttcctagggcatcccaggctttcttgaccgtacccctaggctctagctcagacgccttaggaggggccgcaggagcattaggatcaacaatggcagagccagctgaatcctgatgacgacccagggtgtccaaaccagaggatacagcaccaccagcagtacccatagctgtaccagtaaaggcagccgtcaggaggttatccatgaactgctctggggtttgtacctgccctactgcatcataggcgatggtatcctggagggcctgctgggcaccagaggtaacaccttcagccacaccagagactgctgcatgcttaccagcctgggtaacagcctcgatagcggtttgcttaggtagtcccgattggaccaacatctggtaagcgccatctttaccgatgtgcttgaggagtggggcagcgataacaccagcacccgcagtgtctagtaccgagaggccagcaccaccgaggactgcggtccatgggttgctttgatcggggtctagttccttcatctggttactcagggcacctacgttgatacccatggaactcaggaaggaaccaatgagcgctccacccatacgaccaggggccccaaagacagagccagccttagcacctgcggcaccaccagcaagtaccggggccatcgaagggagagcctctacgatattattcttaaggaacgacccgatggatgggatatcttggatatcagcgaaagaccgaacatcaggggttccgtactgtgacgcttcctgagcattctcctcggccatctgtgtgccgtagtctttcaggtagtcacttccagtcagttcaccaagggtagcaatagtaccaccgatgttagactgcatggtatcaaccccacgaccaatcgcagagctaatagaattagggtcagccggagttactagggcactcaggtctggggcaggctcaggggtagcaggggctacttcctggggtgcctcttcgataacctctggctcattcaaggaagccaattcagcggctacgtcgaggcccttgacctcagccagttccgcatcaatagcggccttcagttctggagaaagagccataagtcaccttctagttgctggaaagagaataggctcttaagatgtatcttaggatactaaccttcttagtaagtaagtcaaaaggaagaaggaatcttaagagcctataggtctattatactacattttggatactttgtcaagtaccttttatcgggttggggcaggatagtccagatcagcaccaaaccagttacccgtaggttgaagcttagcagcctcccgctggataatacccactgggttagccccaggattagcccgaagttcatttcggacagtctgggcaatagcctgttgggcagtcttactcagcttcttaccacccagagcctgagaaccattgacttcactcaggataccaagggcgtccttagtagtaacagcttcacctcgggctgccttagctgctgcctgacgtgcctgagcgctaatcctagcggtcttgagtcgtacagcagaacctagctgggcattctcttgggccatgtcctggccacgtcgagtagtttcagcctgtagctgggcccgttggttagccaggtcttggccacgtcgggtcaactccagattagccctatctacagcagcctggttgacccacttatcaaggacgccctcagtcttacgcttggtttgctcaagggtcccttccttaactttcaggttgccctcaccaaggcgtacatcagcagcatccttagccaccttacgctccagatctttttccttgatctgacgatcagcagctgcggcagccatcttctgctggttgatcccagcctgtaggttacgatccagttgacgctcataggaagcagcgaacatatccccagctttaccagtcttgtctatggccgaagccagaagaccagtaccaatgagagcataagatacataacgagacaggtcatcattatccatagtcctcatctgagtcaactcttcgttaacccgattcttaagctcttggggttttagctctacaccctctctctgggcatcagcttcaactacagcctgggccatttcaggacgacttacagcaccagtacgaagaccctcggctgcaccctgttggatgacctgtcgattagcctcctcctcatctgctacagcagcaccagccgcagaggccacctctggagcgatatcaggctcgatagagggttggttaggggttaccccataggacaggagttcagcccccgtagggcctcctgtggcgttctgggctgcacgttggcctacaccctgggcccattggtttgcctcttgagcaacctcgggacccatgttctcaaccgcttggctagcctgagccatttcttctgcacgagtacgctctgcatccccgagttctcctggggttacagcggcttgtacacctacagagataggaccaccgaggatacctgcgatacggcccagggcaccacgacccgtagcctcagccgcaggggccacctcttgggcagcccgagaccaacggtcagggttctctagggcagcctgagcagcccggcggacacgatcagggattcctgagccctctacagccagcggcagtttgttccttgcgattcgcgccatgtccagttcattctgagcagcccggaggatgctagggcgaattggggacccttcataagccatgctggccataggattaacctccaaatagtttacttaggattccagactttggctgctgtccgaaaccgagttcttctgcgctaggaaggattcccactcccgctcccatacctgctgcaacttccgctgcgcctcgttcgcttgctcccctagccccctcgacagaaaagcttggtactgtttctgaagaaggctcacttccttgcccgaggagagccgcgagtgctgctccgcccattgcgccaaaagggtttgattgtccactagactctcccgattgcattgtcccaaggtgggtggggcggtaggaaccttgacggctcaactgtacccgctcctgcccaccacctatattctgtcctatagcgaacagcttctgaggaagggaggccattagaacagaaggcccccgaccctaccaccagcattcataccaacagaagcacccgctgggccaccgaagagagcacccaaggaagcaccaccgagagcacccagggcagacccgaggccaccaccaccgccaccacccgaggaggtagtaacgttggttccacccatgtcgccggagataagctccttgtaggcgagtaggtcgttaaggctgacgttattctcataggcccacttctgtagagccccgttgatctcctgctgctcctgattctgaagcatactaccagcatcaacctgcatggcattaccagagccgagtcccttagcaatagccgagaggttgcccagggtattcaacctattctggttgtaagcctgctggtcttggaaagccaactgggaggcgttattctgttgattctggagcaatctagcggtagcaataccttctgctacacccgctcgggaactcccatactgaccagcattagtggcccctgctcgcaggtctggacgtaccgtagtgtcgaagtcccattgcatctgctcgttggctgcaccaatggcgttcgccaagccagttttgttgggatcgtaaggaccaaggtaatcagccagagagctaacacctgagctacccaggagagactgaagggcactcccgagaccacccaacccttcgattccactaagctggagagcattctggtcagccaccgggtcaaagttcggatcgccaccgtaattggggtcaaagcccccgttatgtagccaatcactggcacccgagagtagttcattatagttaccttgctgatagggtgtagagacagaggtggtcttttgcttcttgctaccacccttgtaagcccgagagtctagggcatcctctacatcgaaccccatcagacgctttacattaaattggaggaagttcatctggagttacctcacgatagaaggatacggagtcttcggtgtacccgagtttctctagggtaggcttccagccccgacgaccttcgcattggataaaccgacagttaactcgttgggcgaactgtccgaggaagtcgtctacctccgagtaatctaccggggtttcattcccaggcatcttaccactccagaagaagtgaaggatattacccaggggtgcttgggacacttggattacaccaacgtagccactctcttcctggtagaagacataggcctcataattaaccaaggagtgaaccaagtgttcgaagtcccaaaacttaccgaggtccgtcctgttgaaggctcgggccagagcagggactacggtaggaagcagatcgatattctcacgagtaatcaaatgaatcatggagtcaccaccagggggaatgtgaatgtacccccgaagactgctccttggggaattccttggattagaacacggccattagctgtgatcttaaacattgcttggttaaccaccccagtctgaatagtagccctgttgagaacatcaaagacttgatccaacggaggtgcgttagggtcagacggaggtggataagtaatagtgctctgcgctgggataatgctggaataggccgggataaacaactcagcaggaggccaatacgcctggggaagatccaggacagtagctccattagtgtagttaccaccagacatgagcatggttatccatacttcatccttagcagtgttcatcctataggcacaggtacccatcggctgatggttgttctgtggggtaaataggataaaatcccccggcaggtccttgggtttagtacctgcgagtctccattggttatccaagtcgtaatgatagatgccggatactggacctaccactccgggggcaaaatactttacagtccctggcttgagcttcttagggggctccatagagaccccccagtagccgtcagctaggtcattaagagtctgtccaaccctaacgaattcatcattaaggaagggcagcagttcctcctcttcctgtggtggaatcgaagggctgtacttttgactcatcgcatacctgccttcggggccatttcaatagtgtacccattgaagtaccaatccccctccgaagagaagtcgaacttcaaggctatataccggcccacatgtttagtgtcaatcttatagtcctgaccaatccggtatgggtaagggcctttccatcgaataccagaaccttgtacctgagcgttacccacccagatgttacaagtaccgttaccagtaatgtgtggaatgatggcactcactgtcttcatcattcgatcatccccgagatagatatcggatctctcaagggtactgacgaagttctgtccagagaatgtagggttattaccgaagaggaacaacttcttatcctggaaagacgagaagatcatactggactttgctgggttataagatccttcaccccagaccgaagtatcggtatcccaggggttggggtcgtcatcccagaggttagacaccttaggatcgatgatcccgtaggctccactgagaacgttgggaaggtctcggatactccaagtgttttccttccagttccagatgatagccctgtcgcagtgcttacctggctcagacctagtggaagagtagcatacccacatttcagtattcacgtggtctgcaagtacgaaggtccgttgatagttgtcagggttaatatccgagaagaagaacttacggacctgagcatcaataacagactgcttctgcacaccgttgtggacatatacgtcaccgtggcctactacaaagtggttaccatcgaactctattgcacagttgggtccgaggatacctacgtcgttaaacagctgctggaattggaagatgaacaatccaccgatataccgcatggagtatacagagtcttccttgtagatgatgaaggagtcacgaagcttcacaccatccacgatagcaccattggtatcagccaaggtgttctgaccagcatccttagtagggtccgttgggtcccaagatgcaggtacaccaccagcatcagccgaggtactccaccagaccatctgtggcatttctacagagttacttgtagcgtttaagccaaccaggaagttcttaaaagacttaagcctcttaaaagtagtattcgctgggaagttagggagtaccctaaaggttgattctgacggtggaagatgatgaggagggttaaccccatcgttagcaaagattaccccgttgaacgatcctacagaccatctgttagttatactagcagcgtaaggtcctggggatacatcgatgattgtagtcccgtcggctagatacaaccgttgttcagaacacaggagccaataggggatgttattccggatgaaaggaaacatatccaagattggggcctgggctgtatcaaagataggcgtatggcccagagccttctgagccttgccgttcttaaaccggacgttgttcccgaaggaccatttctccagtggcaggtcagcgggggcgatatcggtcacaatccccgtagggttcttgacctcttgtctctctagggccattgtatacctcagttcttaatgatgaagaacacagaacagaacggtgggatattacccaacggcatgttgatctttactgcatggttgtgagtctgaccttgaccagcagggccagtctcaaggttggtattggctgcgttaccagagccacccgtcagagcaccagagtcacccgcagaaccggtgagggtagtagcccctcgggatctccaagtgtgggtgtgcgatgggatttgggctagggtaagggcagtcccttcagtgaacccatcccatacgatgttagcgctaccacctctagtacctacagcctgggaagatccgtcgataccccaggggaatgcaccaatgaggttgggaacagggattccgttagaggtagtccctacaccattacaaagcttccaacctgctgggatctgagccagtgacccagcccacatgataaccatcccaggtttaacatactgggttgtatcagcgactgcgtttagctgggctgccgttacagtgacagcctgagaaatattggggaaggtattcttaatagcactcttaatgagtcgcaggtggtcatccccaaaggacttcagatcagagccggtagggttcgtaggcaccaactggttaatataagttgcgacctcaagacccattcttggcctcctttatctcttctttcatttcttttcgggtgacataccgctccccaaagattgccatagaaatctggagatcgctcaccgcttgggtgagcttctccgtggcctggatgtttctttcaagcagagcctgatgaacattctgaccgacaaccgaggaacctaccgtcactaccgaggatacgaccagggcactgacgatgctgcccaggttatcagttagaagttgcatcctccgtcttctccttaaggttgtcttccaggacttttacgaactcgtcgtcaaccttagagttagtcttctccgccagggccttagcaccagtcacgatggacttagcgattaccttggttgggaagagggtagccagaaggttgattgcgagggtttttagaaagataggcatctgaagctccttaacgttcaatgtctttgatcgccagtcgagtgctagcgaagtcagcggcattctcctcgttctggagttccataacagcccgttcgagtttctgaccccagaactgggaccgagcttcatccatggtgtacagataaatctgctcaaggacaccatagagataaatctgcggatacttcgtcagagcccaagtcgttgggttagcgaggcttagctctgggagtacagtccagtagttcacaatgaacggggcaccgtcaggaacaacggggaatactcgccagaagttacccaaccgagtgtagtaggttacaccctgaggttggtagttgtagttaacataatgggtgaaggtatcctgggtgatgtactgaagagtacgtccaccgataagggagtcacccgtgatagatcgtagagcaacaaagtgctcaggtatctcaatgccaccaccgaaggccattagggtttcgaagtgttcgttctccctcacccgtagcaatcggttaagacggtcagtggtattaccaatgaacaacatcagaagttcttgggtaagatcctgacggtcagaccactggatagcggcgatagcgagatcagttacgttgttgatcgtagccattcattacacccgtgcctcagaggtccgcatacgatagttgtctcggtcgttaagccaacgggtaaatcgagcggcatggtctgggtcacaaccgatcaggttaagatcgatgggaccaccttcagacatggggcgattccgtagggcctctacaacaaccagggggatacttgctaccttgcgcatattatcctttcggttactgttgacacccgagtggcgctcttctgcgttagcggacaggattgactcaacatcttgagtatcctttcggataaagagcccaaggtcttcgtcaattgcataagtcgattggatactcatgatgtacctcctaaggggaaacaaagggccccgaagggccccgttgggttagacctgggctacgacgtcacggatcagagcaccggacttctcgttgttaacacgcagggtgtattcaaccagcagttggcgcttctcgctgtcaccggtcttagccagttcgtgctggaagaacggacgcaggtagcagagggcgtgcatcttcggatcaaagatgaacatggtgttttcgtggaaccagcggttggcacgaatggtgtacttaccgaagtcactctcgtagacatccacggtctgcgcaatgcggttatccgaggcatccagggtgatctcagttgcacgacccttcatgttcttgctgatggccttcttgatcgagctcgaagtctggatcgagttagcctgaccaccgttgcgccagatagcctcagaggcattcaggagcatgtcttcggtcagaagacggaggtcaccagcggtaccagtgtcggaaccatcaccagttggcagggtaccattagcacctaccgaaccgttggtcttgtagtaggcaaagatgtttgccatctgacccggagtagtggtgttacgctggatcttagcctgaggggcaccgaccatggcgtattccatgtccagcttcagttccttcgacttcttagccagctgatacgccagttcgttcttacgaccagccttcttgaccttatctgcggtaccggtgacttgcagggtctcgtccgagatttggcagtagttgttcaacatggtggtgaagctaccagccttgatggttgcatcctcaccttcaactcgggtgttcttacccggctggcggagttcatcagtctgccactcgtgggtgatagcggtagctacgcccttgccgatagcagtcatgaacggggtgtcatagggtgcgatgttgtagatgatatcgataaggtcttcgcgcttaccgttgatctctacagtcgagacggcattagttggagttgccataagttacgtttccttctattagaaaatatcgagagaggagaagagagcagcagcggcttcaaccgactggtctttcctcagattagcgcgggcagctttaacccgcttagaaccctctgaggcttccgccctacgagcagcaggtttaactgcggcaggtagttcagtctcctccttcttctctagggcagccttgcgacggacctgagattcagcccacttacgtgctgcatcgagtacagccagttggcgggcatcagatatccctcggatctcatcctcggagtatccaatcgatttgccgtaggacacaatcttgtcaccccaagactcatccgtagtcatttccgggataagtttcttggctagctctgtctgacgcttaacgtaggcagagtggacaatctcggctcgcttctcttgcatagccttaatgtcgttacgacgtttgataagagcctgggctcggtctcgggcttccagggcttccagtcgaagggtttgatacttctctggatcctgggccttaagctgctcccagtttacattgtcatactgattagcaccagcaatagcggtaacagcgtactgctcaagctcggccagtagattagagcgttcagcatcaagctcttcgaatttagccgcatactgatcctctagttcagcctgtcgagttacaaactcttcattgcgaaggtagccactcttaagctcttcgaagttaacctcgtagacttcatccccaatcgggatctcgaagagtttatcctcaggatcttcctcggactcaacctcgggatcttcctcagaaccctcttcttcctcctcggactcaacctcttcggtgtcctctggagtaccttcgtctactacctcttcctcctcttcttcccctacgactttaccatccacggtttcatcaccgggtgccaggaggtcatcacctagcaaatctccgaaggcttccgctgcctcgaattcatccatgccttgattctcaaggtccattacttatactcctttagagtgatcgaatccaggatagcctgaatacgaagttgtacgcggttgagggcatgtagttcgtggtagatggcctccctggattctgaatccttaggtgccgtggacttccactctccctcgatctcttcttggacaatacggaaaagctcaggaagaacgttctcacgtaccatctgttgtgccgcatcagtcagcactagactatagccaaaacgttctcccaagattatttcctcactgccttagatggcttcttagtctcaggtactttaccgtctccgatataagcagcccgagcctgagtagcctcaagatgatactccgcttcgttacgagcccgttcccaagtgaaacgatcacgctcaagttgtagttccgcttccttaagggccatttctctctgctgaaggacagcctcttgcttcttcagttcgatctcggccagtcggatctgagcctctacctgcttcatctgggcctccgcttgcttagccaaggcgtccgattgggcacgttgggcatcagcttgggctttgatatcttcaggcttaggttgtgcttccttctgctctctgatggccttagcccgttgagcttcaggagaatccgggttagtccagaagcgatccgggtctttgtacccagcgttctctgtgacttccttaaggatattgtaaaggttctgctcagagactaggacccccagaccaccacccccgactacagcctgggccatttcccagatacgcatcaggtggagcatctgctggtctttgttcatgttaccaataccaacggtaaccgtcaggtcggatctttctcgccagttggcagggttaatagcaacccacttgcctcgtagctggaagacctcttcctggttctggtacttaatggcatggtcatgcagaagttggaacaaacgtttaacaccagtctctgcgaacatccgtgcaatcaggtcaatctgttgctcagccgcagtcatcaactggttcacactcatagccgcttggttagagtgtagggtattttgatctagacctcgggtacggtcagtgatacctgtccgcttacccctgtctgcctcaagtcgatccagcataccatagacttccccagacaactgaggggtctctaggggcatgatagagttcatggccttaacccgaacgatacccgctgcctcattagtcagcaagtcttcgaggttaacctgaccatccaagactacagatcgaccttggttagtccggtagatgttgtccatgatgttgcgcatgagtaccgaacggatctcttgaatgtctcggatcttatcgtagacactcatcccatggaacttatgggcaattcgataggcattcagatcagcgaaaggacggcaatcccaaggctcgttgctgatgatatagtcgcctacatacagaatacggcgaagctcagagataccatccccatctacgtccagaagggtgtagcactcagaggcccatacctcacgattagcctcggcatcatccccagagttatactggagttgacccgtcatatcgaagttgtcacgtaccaacctttctggctgactatcagagaactcatactcgtcgtatggtagctcatcgagtacatcttcgggaacacccaggagccgcaggtcacttacggtatacttctcacggtgacataggaagcgtgcatcatcaatgcaggtagccaaccgatcaaccaggaagttctcaggcttgatgcaggtgactttaatctctcgcttcttcttatccttgcgaatcttaatgctgtaggttccatcctcgtccacactctgggctagaatctcagtgtctggatcagccaggatatccgctaccatttcctcagagaggccagagaatcgttcgaaggtagggttcaggacctcttctacatagacctttacaacaccggtcttcatcatcagagtgtcttggaaccagtcgaacattaccttgaacccctcgttcttacgcatgaagaggtagttcacatactcagtctcttgctctgcctgttcaacatcttcggcagtctgaggttcatacttaactacttgaccgcctgacgtgaataccttcataagagaaggcataatccagtctacagtctcttgaacgtccctagatacaatcgcggacttcccaggtcgctcgttaccgaagggctctccaaagtaatacttcagggcctcagaacgctgcttggaaagctccgaagagttgaaatcaagggcgtcgttaacaagttggtctagatgacgaagtacctgttcatcatccataggcttaatcttgcgacgacgcttagccattagacaatactcccaaaccaatcaggggtcaactttgcagtatcactcctgtagtatccactgtttcgtacagcaccaggacgtgcataccgggaagccatcaacagggcataccgggtagcggagatcatatcgtcgtttctgtcgataatctttccgtcctttcggtggtacattttcatttcttttaggaagttcgtacacgtattaaacaccttcagatcaccattctccatacgggtcaacatccagttaacgccgaactctacagagttacctccgtgtttaccatcaggacccggtgggttactgaagggctcatacactacattgaggttgtggtcatctttaagaaggtctacgaatctacgaccagaggttgctccatcgtgcttaaaggcatcatggggaacaactaccgggatctggtgaccacccttcaggtagatagcatcagcgtgcatcccaagggtctcaccactctcactcctctcatcatagaggtagtatttgtctttctcagggtcccaggccacacaggcgatagcgttagggtggtcaaacccaaggtcgataccgatgatcctatggaagtgatcggggatctggaaaggctcacatacaaacttctcttccagaatggggaagactacaccagatccgagcatagggacaccctcggccctcatcctgcgttctgctggagagtatacagagagtagctgctctttaacttctggactgaggtgtggggcgtcttcccagcttgcatggacaaggaactgaccaggtttaagatcctgtaggaagtccttgacgatctccgtgagaccatgctctggggtaaacgtcagatatacaatacccccagtagtagccgttcgggttacacactgggtataaatatctttggggcattcctcatcgagccagatgacgtcgatggcagtacccatgaatttgtcctgggacatttcgtaggacttgaagatgagggacgagaggcccccggaggtatgcttaacaactactgcttgcacacatccgggtttaccttccctacgaatcgtctctacgatatcttccttggggatcatccccgttccgaaagcctcagggttcttccagtctcctaggagttcggactggagaatatcccgagtggtatccgtggagatccccgccgcccagcagttaactggacgatcatattttctaccagtccaccactcagggtatcgaccggttaggtggcaggccatgataaaggccccggtgtaggttttaccacagcggttaccagtcatagccagtagctgggcgcagttcgaggaagctgcgataaacttctcttgccacccataaggagtgtactggttcatgcggaagtatttctgccgctcagccaactccctgactagattccgtagccgctcttgggtatccattagaccaccttgtcacctactgttgatgcacgccacagggcccgttggaggtcccttacgcgcactggagtttgtttagcccagaggctatcctctgcctcccatgcagcttcatcaaaccttccggatttcagaagattccacgtcttggggaacttcttcgtccacgctgtacccagctggaagttgacgctaactagggcatcgaatagctctggagtgcaaaaaggcagctgagatacttgcccttgggctgcatcataggctgccttactatcgttctctagccaagtctctgctcgggctagggtaatcggtccgtcttccccagggagttgcaagtgaccataacctccggtcattttcccaagggagtctttgtaccactttagaaccaacccctctcttcgcttgattagatcaaggtacttaagaggttgggaaagaaatgactttagccaactctggctcttcgtcgagaattcgtcgaacttcactgattagatcctctgcggacatatcttccacattcttagtagtaagctccagtttctgcttagctccgaagcctccacggtccaggatatcctgggctgccttgaggcgaatcccacctttctcttctgggttgctagcaatctctacaaccacacgaagcgccatggggacatgactcccgatgcgctcagagataaaggcgttgatgtattcggcatgctttcgatggtatgcagcaacgttgcgttgagcgtgattaggagagaacccagcggctatatacgcttgggttttattcataccatctgccagagcctcacaatagaggtctagcttttctttagcagaaagaggagcagccccaatcgagacaaccttttcgtctgacatacactgctccgatctctctaaatggtcaccccggtaggactcgaacctacgacctcctgtgtccaagacaggcactctaaccaactgagctacgaggagttaatggtggtcgaaggaaggaattgaacctctagccaatggcgtccgggttacagccggatggtagtagccatctacctctacaacgacctctgttggctgggacggcagggctcgaacctgcgacctgagagttaacagctccctgctctaccaactgagctacatcccaatgaaatcttaaggtaatttctcaaccttataatactattatatcacactttttctattttgtcaagtcttttttcttcttttttttacccccaggagtcccccagataaagtgggggtggccctctcccaggggtactagcccctagggcctccccaggataccataaggctagtccggggatcaaccccttgagctaccgttcatcggattagtccaagggtattcataagaaaaatcttagggtattcagggggtggatcggggggat

SEQ ID NO: 32 - DNA, 46076 bp, unidentified
  source 1..46076: mol_type = genomic DNA; note = EPa87
cccccagagtcccccaggctaacgttggggtggccctctcccaggggtactagcccctagggcctccccaggataccataaggctagtccgggggtcaaccccttgagctaccgttcatcggattagtccaagggtattcataagaaaaatcttagggtattcagggggtggatcggggggaataccttgtcaagtactttttgatatttcttaagaattccccctgattgcccgacgaacggtatggatagggttctataggtataccctaagactacccttcttatgttactggtaatggggttataaggtctattgatccgggttctataggtataccccaagactactcccccttgtcgctataccctgggtctagttcttcttatcccagcaatataccacaaggtatagtccggagggtgcctttgatccgggttatagccctgagagtaccccaaaagtctattttatcctccggtgtatttagggaatatccccccagagtcccccaggctaacgttggggtggccctctcccaggggtactagcccctagggcctccccaggataccataaggctagtccgggggtcaaccccttgagctaccgttcatcggattagtccaagggtattcataagaaaaatcttagggtattcagggggtggatcggggggaatatcccttgataaccccttgatcccctattgacttccattgatcccccatgttaatcaaagactgtctatatccgggggtttgctgggggactgatagtccatagactgtatgaaaaaccagtagacaaccccgtaaagaatatggcgtaatggcgccgccttgagggaaaccgacaggcaccgggggaaaccccaggggcttgacaaaccccgcggaaccgggtctaatggcccccacgttctacctcggccaccatcccccttgccgcagtgctatccgggggatgccaaccagggaagagcgcccaagtcacccaagtgtaaggccggcaggcatcgggggttgacaagggatcggtgaagcggtatagttcgccccacgtcaacggcataacgtgcatgactccctcgggattagcgtagccttgacaaggcaagcccaagcctctaacatgggcacccatcaggtgacggccacctggggaaagtgtaccctcgacggtcctttggactgaacaggggagaaacccgaaagctgagggaataacgcacactccgaaagagcgtaggttttggccttgtaccatagaaggtccgactggtagcctgtcccagcgcaatcaattgacagaccccgtggttcaagcgcgacggggagtatgatgggttagtgtcgaaggcttagcgtagagggcgaagcttggtagatacggcgaaggtaggggcgagtggatacgaagacccccgaggataaccgaggacagaccataacgacgacactaacgcggaaaggggccggctacgccaatgccaaggtttgccgataacccctttgtcgtatcgggatgtgtgtcccggctgatgattcctaaaggatgaaacgaccatgactcaggctcttgacaaaaagctgcgtcgcaaggccaaccgcaaggccaaggctttgggttacaacctggggaatctggggaaggcccaacagcgtagtgagcaaaagtttgggatcattgcaagttgtaacaagatcctcgacgacaagaccacttcgttgcaagaaaaggcaggtgcgcgtaaacgcaaggctcttatgagtaccgactggcgtaaccgcgaggttactaacctaaggaactggtataagccaagcaagtgcggtaactctgccgtcaccactatcgaagtaaacaactgaggtaattaaaatgagcgactacaagcgcatcaacgggatcatcaagaccattgccaaccggggtgctgccctggacaagctggttcaaaccaccggcatggatatcctcaagcatatcgacgagcacggcgaggtatcccttgcctgcaagctgttcaacgcgatgccgcaaggctcccgccggctggccctggcccactggttcgtagacaacggcaagatcgcggccaataccgacaaggaaaaggccaaggaattcccgttcgtctacgccaaggacaaggccactcgactggagcgtgcagccgaaaaaccctggttcaagtacaagaaagagcgtgacgtggccgacgagttctccctggatcaagccatcgccgcattcaaggccaagatccaacgtgccatcgacaagggccagctccaggcagcggacgagcgtatcgccgtgatccagcgactggaagtcaaggacgaagcgaaggctgcgtaacggcgggtgcgcctggggtgtgtactatgacgcgccccaggtctatccctagagtgcatggtaggtccgtgcattgtagcgatagaccatcaggaggtttccgtgagttattgcatctttgggcaggttcattccatccaaggccaggactatgtttctggtttctgcgatgcaagggtaggtttcgacgctggtatcgtgtaccgttggacattcaaggacggtaaatttgcttgcggtgtttacaccctggaaggtatccgtctgaacatctgcgggtggctcaaatgaagtcaccctacgaagcggcccatgaacgtgctcagatgattaaccgtctcaagaaactcactaggatgatccgggtgcatcccgatcccaggtggattgttgagcgtcaggaactcataaggaaactaagcaaatgaccatcgctatcattgtatccagcattggtatcgcctacttcttctttcgtgattggaaagaggaaatgggtatctaatcccaactgatgaggccaaggtgattcctggccgaaacccccaccggacctatggtcgcaggctggggcgtcttgggaaatcaactaaggaagccatcccgtgaaacgcaatgactaccgcaaggtgaatcggaacatgcaagccatcgaggccatcgaccgaaagattgccaaggctgtccgtgagttgactaactctggcggaagccacgttggcaagaccctggagctgaatcggctacgggctaagcgtgcatcgctggccaaggtaagggcacggtgagtacatggaagtctattgcatgtgccgccatacgctcacgttccaatgggttgctgctggtaacgtgggtggttctcttcgtcctgtcctcgatcttggacagcatcccttttgcatcgtgaggtagcccatggatatcaaggtgtggccccgcaacggagtaaccctcagttctctggttaagtcccaaaccttcctcatgaatgggggtgtgtacatggtctgcgaactccgcagcaccaggatgaagggtgaatctgatgaggttgccgttgttaaccttaagactggcaacgtcatttacatgccgccggtgagtctggtatacccagtaactgccgagttgaattgctacgaggtgtagccatgaacggtttctcattcgcagccataatcctgtcgggactggctatcggttgggtgattggtgcgaccacggtggttcgaaaagatgcacccgtggatgtaagcaggggcgaagtggttggcaagatggacggggtgagtatctacaggctctacgacccagaggaagggactgtttgttatggcacctaccggggccttagctgcctgcgtcctcaaggtggtgtaaggtgatcgtgactaagggttgtagtaacgggtcagtgggggtttttaaaaagaaagtagtgattggtaggcatatggtttttgtttaccagaatgtttgctacatctaccaagggggtactccctggtgcaaaaccccgaccctatcttcggcgaaggccatgattaataattatgaggtggccgtgaaggactcgtccaacagggtcaaagatatgttcggcgacctcatggtcatcccaatcgaggaggtgtaacatgaaactccaatacaacatgattaccagtaagatcaaggttgtgatgtggaatgaccttgagccaggttgcctgtacatcttcgcagaggatgacgggaagaagaaccccaaagtcttccagtacctggagcttaatgatgaattcttcatctgcgaaatcttcggcggacctgagggcgatgtattcttcagcagcgacgttgactgcgggttcttccccgtgactgtcaagtacgcagaggtcgaagtccatcggttcggcccaccggcctagggtgtgtactatgacgcccgcccaatacatctaccactggttggtatccaaggttgtcatccggcgataccagcctaaccccaagctgtaccccaactggtctgttactcatatccgtgtgtcgatcttcggcaaacgtgcaggtatcgtctatgaaatccactgaaccccaagtttactggctggctagcgccgatggtgaattccacctcaaggtcatcaacttcggccagttcatcaccgaaaccctttacgaactcggcattccggtggaccacaaggttcatcgggtccactgaggtgtctatgacaggtactatcttcaccgtagcggtgtcccaacctcgaagtgatctgcacatcagcaaacgccaggatggcgcgtatgtaagcatcaagaacgatgaggtatacctcaaacaaggcgggaccgtgacggttattaccaaggttggtttctccatcttcgcagccaatatggtatgcaaccatggggaaatctacccggtgaaggaggtccatatatctgccaggatgtggggtccgtatgaagagtaaaccaatgatcggccaaatcatggcccaggagcgccgcatgaagcgtcgggtagagaaacgtgggttcaacatgacccgtcaggaaggcccccaggagccccgtggtgagcttggcttcaccttggcagccgtaggtgtggagtcgagtcgatcggcttacctgcggcacgccagggaggctatgatccaatccggggaggcttgcccccactgtatgccagtcttcggtcctaaagagggccgttgctgcaactgcgcgagggattggtgatgacaactccagaaatcctcatggtgtccgccgttaccttcttcggtttggcggcctacgggttcacgtcctgcctggtctattcggtattggaagagtatgggatgaggtgggggtcagatcgtgattgggcagtcctcctgtccttcttctggcccctgtccctgcctgggatgatcctgtacttcacctgctacaggcccctcaaggaagtcttcatatcagccaagcggctcttcggcggccactacaggaggttctgatggaaagtgtaatcgtctatgcggcggcggccttcttcctcatgatgtgctgcttcatctacttcctcgtggcagccgtaggagtgtgcatgaccttggctctcttcgaggatagtggaaggatcaaggaagagcacgccattgtcattggtgtattgtggcccttgtcactcccattgatctccttcggcttgatggtctactacctcctcttcccgatgaaactcttcatcatctccctctaccaagttatcaaaggaatcatcaaatgagagagcacgacttcccctcttgctgcaccgccaaaatctacaccggtatgggcccgtcggggaccgctgactaccaatcgatcagggactccgaggggttcagccccaagaagtttgcgatggatgttctccaggccctggctgaccagtacaacgacggtgaagccctcatggtcttctccctgaacaacgagcaacgggtcgccgaccgcatcctcagccgcctggggagtaccagcaatccatgggccagcagcgacaaccacgataccctcgtgcgagtccacatcatccgggtccgtgacacctggggcaagctgtgccgggaaaatctggtacgctacgaccacttctacgaaaaggccatcccgagcgaggacttcatcagcaagttggttaaaggtttgtaacatttgacctattgactttctgctggatgtgtggtataataaccttaaggtgccgggggttgctcttatacctataggataccttaaggtctacctttatatcttacttattatgtgaggtatcaaatgctcaagttgtatacccggactatgctggtggctatccccctgtggattctctaccttctgatcctcccctacctgatgacctcggattcaacctcggctagcgccctgggtgccggtctgatggttgcctccatcttctatgggctcttcttcttgaagtacctgtacaactacagcaagcggctggagaaagggggcaaccatggatgaggtaaaggcgagtaagcctcagcacgtcacccctcacttctggcgacaccgagggggtggtcgaatctttgtgtcaggtaattttaacctggacaccgagacgatacccttcatctgcctggagactggccaaagctgggacattcaggaggggcgggtagagtatatcttcgagttactccccaagggccataccttcacggtggaggtctgatgtactatgacgaacaacaatggggaccgcacccaagggcgccgccggtgttaccgtaccagtgaggtaacttctgacatatacgacgcaatccacaatatcccagcaatcgctggatcccccaagaggccacctgatgatgattgggtatactacctcctgctggtagtcctcttcatcagcctgtgtatggtcttcatcactcccctcattaccagcaaggatacagcctatgaaagccaaagtcttctacgagcgactgaaaacctccggagagctgaccctgaatggcggcatctacaaggccaccaaggttcctgcgccccacaagggtaagcagcagcgtcgcggccccttctaagagggcgttagtaatatccctaggaactccctggggatattgctggctaactcaaccaaggagaaacaagatggctcgactcaagtacgcaatgaaccacgggaacgccctcgtcatgatgaccagcggctcctgctttggttccctggagggtaagtccttccataactggaatggctggttctacatccaagcccgccgtacccccaagtacatccgccagatgaacaagatgttcgctgacattaccctgacggtggccaacaccaaggtcaagatccccaagatccaccactggcgcatggggtccaaggccaagagcgcaccctggaatcgattccccaaccagaaggtattcaccgatgaccgcatgtggggtaacgattacgtgtgcggtgtctacatgaacccccggaccactaccccggaggtctggtatcccgtggtcaagctcctcttcaagtgggtatcctctggtgtgtttgattgggaagaagaggcccatctggagttggccgataagcacggattcctcctgtcctacgtggcaatgtcctgctacaacctgatggccaatgggtacaccgagcaccccctgcgaaacgtccacggcaaggtgtggaagcccgaggccgtcgaaagactcctcaagggcgactgggaaatgcccaaggtcgaagaccaaggaacctatggccggtggttgaagcaggaggatggcacctgggacttcatcctgggggttactcctacttactacggtttcaataaggagaagatcgagggtatgcggaagacgatggacaaggagttccagatcaccatctaccctcagccctgctacctggggaaatgggaggatagccactggcccttcttccagagcaacaagctgcttcctcagcacgtaccctccgtgaagaacgcgggggagcgtatcgagttgataccccctcacctgtctcgtccgatgaacggggtacgaaaggaggccttcctcccccaactgcacatcgtctgtcaacacctcaagaaactcatgggagattaatcatgggaatgtatgcggcagaagtaatcgaccgggagggaagacccttctcccaagttaagaacctcaatggtcatacccgttgctacggggacttcgaggacaggaatggtgaagcgggctgcgttgtccacttcatttcccacactgccaacgaagtgacccgaaggatcgctgtggactttctcaacagtgatttcgtcaaccggatgaccgatggagctatcctggcggcgtccgaggatctccccaaggagtggtgggatggcaatggtgatctcaagcccatcggggacttcgaactccctcgggcaatgagtcgcttctacgtccgggtagatatggacaagcctggcggtcccatcatcaacgccctgcggatggcccacatgctggtccacgccagccaccagccgaacctacttcagaagttggaccccgtggttgcagtcctcgtggcctgcgcaaggattggccacaacttctattgcgacagctacgtcagcatgatccccgtgactgctggccagtatcgtgagcaatgcgagaaggagggcatagaggtagatgactcctacctgacggagacgatggccaaggctttgggactggggcggattgatagctggggtgattatgtacaagccccagagcttctccacgggcccaccctgtacgatatccaagatatcatgggtcgtactcgggaaaccttcaagcgtctctacagcggccacaaggaccctctctggcaggggtataccaaggactgccgagctatcgaggaactcggcctggatgggtacgaggatgatgatatcatcagcgtgtccgcaggtatcacttatgacctcaacgacaagaaccgtgagcaatatgaggtaatgcctctcgatagttacgaggacaccctcattcaattcttcaccgaaaaccaactgattaaataggagaactgccatgaaaaatatccctctgattggtgctgacccggaagtcttcgtaggcttcggtcgtgaacccgcatctgccatcggcttcgtcggtggtactaaagacgagcccatcccggtggaaggtggggcgttgcaggaggataacgttctgctggagtacaacattcatccggccagctccttcgagcaattccaccacggcatcaccagcgtcctgaacatcggccgcgacaccattcgccccttcggcctggaagtcatcgacaacctgtcctcccacctctacgaggaagatgttctccgtggattcggtgatgcagcattcgtcttcggttgtgagccggactacaacgcctggacccgcagccgtaaccgtatgccgaccgatgcacccccgacccttcgtaccgctggcggtcacatccacatcggcttcgctgacgaccttcctgttaccaaggccaactgtcgtgcggtgatccaagcctgcgatatctacctgggcctggcctcggtgctgatcgacggcgacaccgaccggaagctgctctacggtaaggccggtgcctgccgctacaagccctacggtgtcgagtaccgtaccttgtccaacttctggatcttctccgatgagttgattaagtgggcatacgactcggccctcaaggcttactccgtggtagtcgaaggcggcctggatgacgccatcgcagccgtaggtggtgcagacgaggtacaacgtatcatcaacgagaacgacgcagtggcagctctggcggccctggagaagctgggggtggctcatgaatgacctcaacaacgatcatccgctggccggcgacttcaccatgtactacggaaacacctacgtcttcttcgagaaggagggtatcccccatgtgatgtacgtcgagggcaccgaggaagatggcgacgatacccggttcgatgggttcgttctcctgggtcgtacctacaccctggatgacaacgagggccggtactctcgggttcgcttcagcgatgtagtgaccgacagaccggccagcgggtactatgacattcacgggacgggcttccgtaacgtttacgtcaccttcgctgtcaacaaccgtactcagaagaaaggtctggacccccggaacttcatcctgaacgggattggcagcaacggcagcctgtacccggtgaatatcctccggatcttccttcaatcccgagacatgatctccagcccatcccatcgggacttctacaccgaggaaggcaagcgagtcttctggaagggtatgttggtgggtgatctggtggaaggccaactggttgtcaaagatgaattcaagaaacaggagggactgctatgtcggctctatactctctgattggccaccgaaagcgtgaccttcccgagctgcaagcccacgaggaactcccagcaatcgcatccttcgggttcgaggttgagctggagggttccgacgagtggccacgtatagatgggtggaaccgcaaggaagatggttctctccgtagtggaatggaatacgtcttcgatggccccgcgagcggtgcagaggcaatccaacgggtagatcgtttcgctgctaccatggaagctgtcaaaccggcacccaccttccgttgctccactcaccttcacatggacatgcgggactcttcgatggatgttctcatcaagaccgtcctgacctacatggtgttcgaggatgtgttcttcgaccattgtgaaccctaccgccgggatagcaacttctgtatccctttcttctccaacgattggctggctcaagccttcggtcgtcgtctcctggccgtcaatgaagacggtcttcgggttcgagccctgatgaactggcccaagtactccgccctgaacctccagaccgctacaaccttcgggtccatcgagttccggggatcccatgcgatgacctctcgggatgaaatggtcgggctgatgcaacgtatgctctgcctcaaggccttcgcccaaggtcacgaaggggttgacacctccgagtttctggaggtactggccaatgtggatctgcgggatgtgttccacctgggactgtctccggactacaacatgtctccgggtggccgtgagatgggtctggcggctgctgccctggctatcagcacgggtattcaggttgccaatggtgttgacccgatggaggaagagcaggagagacagcgccgactccgtgagcaagaacgtgctgcgcagaacctccgtcgtgcagaacttgttgcggcagccacaactcctctgagtttctccgaggaaggcgtcaatcggttcaacatcgcgagggctccgggtgaggtaagcaacctgggtaacgccttgatgaccgtatctgccctgcgtggtatgggttatcaggatgcaaccgtccgtaacgtcttcgatctcactgacgagagggtatcggctcaggttgtgaatgccttcgtcaacctgatgacggaccataccaactacgtcctccgtacctacggcgtaaacattcaccaagaactttactaaggagtaatacctatgtgcggactagtaggcttctgttctacaactaacgcgagtgataacgaaatcgctcttctcaagaacctcctggcggctgatatcgtccgtggtgcccatgccacgggcttggccaaggtcgatccgatcaagaacgaggtcagtattcacaaaatggctgtagatgcctacgacttcctggcccatgcggacaccaagaagttcctcacggagaaccgtgcccgcatctacatcggccacaaccgttatgcaaccatgggtgacaaaggggatcatgagaatgcccaccccttccaagtggaccacatcacaatggttcacaacggcaccgtggatgcctggggtatcgatctgctggagggtagtgatactctcaaggttgactcccacatggttgcagccactatcgccaagcatgggatccgtagcaccctggaggaacgcttctcgggtgctgctgccctggtttggtgggatgcaaaggagcgcagcctgaacttcgttcgtaactccgagcgacccctgttcttcgctgtgactaccacggggactatcgtatgggcatccgaggattggatgctcaagtctttcctggagcgtgcatccagcaagatcaagcttcgcggtaacatcgtggagctgtctgaagaaaccctggtatccatcccgttcacggaggccggcgtgcggaagggtgtagagcccatcagctctccggtaacctttctcgacctaccgattcccgaaagttatcgtcaggcagaaaagttctggggcaactacgtcggagcggaagcctggaagcaatatctcggggactactatgacgatcaaggaagcaaaggcagccaagcgggaacgcaagctggccaaaaagcttcgtcgtcaagagcagcttcggatgaggcgtatgcaaggaataccctgcgaatcaacaacaacctccaagccgcaggaagctaccgcaagcaccacagcctcctcaccttccgtatcgtcgaagtccaaccctacaaggccgaccctggctttggtacagtcgtcgggatcgacctcgaagaaggaatggtcgtcgaagcctacggactcaacgtcgaagccctcgcaggatacaccacactccgtggaagtatctccaacgcctacttcatcggtgaagaccgcgattttaaggtggtggtcgaaggtgttgccgtaagttgtcttgacccaaagcacaaggccagtccggtggatgggaccccgttgcagaccattggaacgcggatatccccttctaaagttcttcagatgaagtccgaggctggcaataccccaccggcgaatatctcgtatcccctgaagtgccaagggcataccttcgtgaacagctacgtcttccaagactttgtatgtcgtggttgtgctgtctgcggggatatccctacggcctatgaccaacggaaccgtgaccttacggtgtacgaaggtagtaaattcaccggcgagcttaacgagtgtgagttcgtctgtggcaaatgtgtccgtgaaggactttctgaagcagtataaggaggtcacatgacccaacagttcaaacgacaagttgtcatccacatggaaaccgacgcaacccgcaagtatccgttctcccaggagactctggataagatggcggatatccgtcggctgaaagagcaggagctgaatgaggccaatccgggtgaagagttcctggtgccggccccgatcgtcctggccgaagcggtggatatgctccacgagtactacttcgagtaagtgcgttagtaatgcccctaggtgactgggggtattgctggcttcactaacctcaatgaaacaggagatacatcatgatctatatctacaaaggcaaccgtgcatccaatggtgctgtagcccttcgtaatgccctgggtggacgaatccttcgttccgagggttcgacctaccgtggccggcagggttccatggttatcaactgggggactcagaaccaagaggctgaacgtctccgtcgccttgcccccatcttcctgaacaacccccaggttgtatcgatggtcaccaagaaggatgaattcttccgccatatgcaaactgtaggcccggacctgatccctcgctggactaacaacttcgatgacgcagaagccctggttaacagtggtggtggccgtatcttcgtccgtactcaactcaatggccatagcggccaggggatctctctcctggtgtctccacaggatgcagagattcaggcgatccagcagttgatccgcagcaggcaatatccggtgtatgtcatgggtgttagtaatatccccggtgaagtcctcggtgctcgtctgttcacccaaggtatcgtgggccgtcgtaccgagttccgaatccacgtggttcgtggccgggctatcctgtcccaggttaagctccgccgtaacgtcgatggtgatgtggcagatgactcccaaagtatcgtacgcaacgtagccggcggctgggtctatggtgtcaacgatgccgaagaacgccagggccatgctcaggcagtgggcgcagcaatccaagcgatcaacttctgtggtctggacttcggtgctgtggatatcgtctacaagcacgagactgaccgtgcctacgttctggagatcaacactgctccaggtctggacgaaggcggtagcgccctggaggcttacacccaggcattcaccaacatctacgaagagggcgtaatctgatgtttgtttttgtttacggaacactgatgcacggcttcggcaaccactgtcttctggagggcgcccgattcgtcgggcatgccacctcccaagagcgaggccgtatgtactcctgcgggggattccccatcctgtccttcaaacaccgtgaggatcttgtcacgggtgaagtgtgggaactccccggtggagatgaaggaaaggaaatgttaaacaatctggatcgccttgagggttatccgggttggtacgatcgtagccccaagaatttccgtatcaacggggaaatgattaccgcccttgtctatcaccaagacgaggatcaagacctgcacatcgtcgagggtgctgactggcgtaagtttgttaataaaaggaatgctgcatgacccatactgatgtagttaaggcccacaagatttaccgtgatattcccaacctgatgaaaactgatgatgaggggaaacgtcagctcctccgtcgggtaatcagcctgatggcatcccagcgacaactacaggactccatcagtgcgtctgtagagcccgctacggaggactcggattacagtgggtactatgacgagtctgctggcattcgcttcatgtgggagcgcctcaaggccgtagaggatgagttgcgcctgctggagaaacagttgggtgaattctcctacccattcctgacgtatccgggcaatgttaacccggttccttccctggtcctcaagagtcaactggagggttaaatgaagaaaatcatcggtgatacggcttgtccgggttgccgagctaaaggtggggatcacacaggtaatcacctcatcttgttcatcgacgaagaaaagggtagccgcttcggaaagtgcaaccgttgtggccactacgaggttcttgacgaggggtttgtagtacctaagcgaacggagaagtccgaagaggatatcctccgggaagtcgctgaagtccaagagtacccattcaaggcccttgactcccgcaagatcagtaagtccatcgcagaacgctatggggttcgtgtgggattgtccatggagaatggtgtagatgtaatcgaacactactacccacggacaaaggatgggaagtaccgtgcgtataacgtccgtatcctcgatcccaaggcgttttactatcggggtagccccaagggtggggtcgatccgttcggccttgagacgctcatgcacaaggatgtagggcacctcaagcttattatctctgaggacgagctttcggctatgtcgattgctcagatcatggaaagtaagttacccgagaagtggaagcacctacggcaggcgtccattagctggtcttctggtgttggatctgctggtcgagatattggcttcctcaaggagtctgggattctcgataggttccaagaggttgtctactgtcacgatgctgacgaggaaggtcgaaagtccgtagagagggtccgtgccctccttcctgactgtaagtttgtcgaaatgccactcaaggacgctaacgacatgcttatgcgcaatcgggcagatgaggtctatcagctcattcgattcggaagcaaggttaagtccccagactgtgctgttaccgtagatgaggtctttgcagaagcccttgaaccacctaagtggggcaagagttatccctgggaaggcctgacgaacctaactatgggtcagcgcgacggtgaaatcgttggtgtaggtggcggtactggcattggtaagactctgctggctcaccacattgcagcatggaacatcatcgaacatggggaaaacgtaggaaccttccttctggaagagcaagtcgccatgacactcaagaacatcgcaggtaaggtagcccaaagggcattccaccggcccgatcttgagtgggatgtggaggcgttcaagaacgctgcgggtcagcttcggggcaaactcttcatgtggaagaacaagggtcagaatgattgggagcatatcaaggagtgcatccgttattgggcggttgctatggatgttaaaaccatcatccttgacaatatgactgccatgactaaccacttgtctccctccgaaatgaacactgagattgctcgtatctccacagagttggccgggatggctgacgagttgggtatccgagtattcatcttctcccaccttaacccacccaagggtaaccgtacccacgaggaaggggctgaggtgaaggaaagccaattcactggtagccgtgcgatgcagcgttggtgccaactgatgattggattcgagaggaacaaacaagcctctggggaagagaagcacgagagccgtatccgagtcatcaaagatcggaactatggtaacaccgggctagtgttcaccaagtataaccctgacacgggttgtctgacggagcgtgaaggaagttatgacgaagtacctgaggacgacgagtccccaatttgattacgttatctacgacctagagggtgacgccctttacgataacgtcacaaggctttggtgtgctgttcttgtggatatcccaactcaggtagtccggggattccggcctgaggaaatggagacattctacaggatcatcgcccaggcaaagttcgtggtcgggcacaacatccttgactacgacaacagggtccttgagaaacttcatggtatcgtgattccagaagatcggtcttatgataccttggtcgcctcccgactcacttggcctgaccgtcctatgggacactcgctgggagcctggggtcgattcctgaagtgtcacaagggtgacttcaacgacttctccaagttctccgaggaaatgtttgagtattgcctacaggatggggttgttagtatggcactcttcaactacctgcttaaggttctcgggatgacctgggaggagctagtagagtggaggactggttcttggctaaacgtgtgaggaactacaagcgtgaaagagaactggctatacgacgcggtgaaacgggcgttggctctaagtcaggagatgctcagcggcaccgagcccgccgtaaggtggaaaagcgtcttggacggaaactcgggtctgacgaggtggtcgatcacatcaaacgtgttaaagatggtggcggtaacggggattctaacctccgtgtccgtagccattcttctaatgctgctgatggtggtcgtgttgggaatcgtaaggccaaaggtattcgcaagaaaaagtaaatgaggtggggccttcgggcccctgaggatctaggatgaagaagtacgtggtcaatgttcagtttcaggacacaaaggtgttctatgctgacttctatcggatcgaaggagagatcattcgattcttccaaggcgaggctgactctaaccccttgctcaaccgcagcctagaagtaggtgcagtccgtggatggacttccgtagaggagaaagaagatggacaataagtacaagcctacaccccaggatgaagcccgcaaggaagcagccctagaggcagccttcagtggtggctggggtggtcccgagatcgatgctgatgacttcgagctgggtaatgcctgcgggttggaccccgaggtatgtgagtcgtgtcagtaaccctacaggtccttgtcatcttctggagtgcattctttcaggtcttcctcttggggttgaactctaagctgctcagggatgacaaaattaaagctggctttgtagtctcctggtgtatcaccctcgctcagtttgcctacatcaaggcagtcgggtcgagccatttggatatcggatggttcatcttcgtgagcggttggggtggtgccctggggattaccttcgcccaatacttctatcgctggtacgacaaggttttccacaaaaaggcttgacaaaagttactttctgtggtataataaccttgtggtgccgggggttgctcttatatctaaaggagacattccatgaactacctaacccatacctcttgtaacatcattgttgaaaaaaccaatgaggcacatcgtgtagagcaatttcgaaagggtcttatcaggaactacctgatgagcaccgagactcccctacaggctgccagggctatcttctccaaactccccaaaggctatctgggggttggggacttcagtggacatgagaagttggctcggtattcccccagcaagaatcgacggattgcccagaaggatcttagcatctatgatgacttctactttgatcgtcatgtgacctttgacccactggacctccttcgggatgccctcgccaatctttactactacctggacaaaggtgatgagtacagcatccgaacggagcagcgtaaggttgacttggcccgattccttgttgatgtggctatttccaagggtgtatctcaacttacctatgactggtgattatatgagtaaagtcaagagtatcctgatggagcgtattgatgagtacgtgtacaaggctgttgctgtaaagttcatggagcagcaattctccctggaccgcaaatccaccgtggattacctctcgtggctagagggcgtagacgatgaagcccttgagtcggtactcaagaaactttcggagaaatctaaggaggattaagtggactggagaaagtcactgttcgttgagcataaggtagctgatatcattagccgccagagtaaacggggggtctacttccagactcaacgggctaagtggcttatccacgtactcaacgaacgaatcctcaagattgacctagaggcagtcccccagatgcctcccatgatcgtccaagcgggagccttcagtaagccattcctaaagagtggcctaccgaacaaacgcttggtcgccctatggcaacgcttgggtcacttcgaggtatctggaccctttacagcaatcgagtacaaggactttgacctgggtaaaaccgcaaggttcaaggactggatgctgtctcaaggctggatacctgaccagtggaatatcaaggacattacagtcggcactgatggcaagaagctacgtggatccgatctgaatggtgccttgaatcgctacatcgaagacctccgaagctccccctctggactactccgaatgaagctccagggaatcatccctgggaagactacaatcggtgaggtcaagaggaagcttgagaaacaacgtaaggttctcactacgccgaagatgactgagacctccatggataccgtccagggggatcttggtaagcttgtgatgcagcgaatggtttgggctcaccgacgctccctccttcagggattagtcgagcaggtgaagcctaatggacgcctagaggggagtgctaacccctgtgcaacacccacgggccgtatgagacaccgtgtagtagttaatatccccgctgctcgttctcccttcgggcctgaaatccgagggttgttccaggggactcctaatgctggtgaatggaaatggactgtcctccgccgcgacataggtgagaacgaaagggtaagaccccacactaacatcgtggaggtcctcaaaggtggtaagtggaagacggtaggcaagtaccgagtatacgtcccagcgaatcaactgatcttcgtgggctacgatggtgctggtctagagcttcggatgcttgcctcctacattggcgatccagagtacacccgagaggttgtagatggtgacgtccatactgccaaccaagtagccgcaggtcttcctacccgagacgatgccaagacgttcatctacgccttcatctacggtgctggggatgccaaaattgggcagatcattggtggcacgagggccgatggggctaggctgagggagcaattccttaaggccaacccagagctggctaagctgattgagagggttaagcaggaagccgaaaggggctaccttgtaggactcgacggacgtaagctaacgatgcgccgtagtgagtctggagaggtgatggtccacaaggcattgaacaccctcctccaagctgctggtgctattgtcatgaagtgggcaatggtgatcctagatgagaaggtacgacgagctggactcaaggcgtggaaggttttggatatccatgatgaaggccagtgggagtgccaccccgaggaccttgcgactctccgtggattcatggagacttgtgtcaaggaagctggggaaatcttgggttgtaactgtcctcttgccagtgattctatcgcaggtagatcatggtatgacacacactgatacatctaggggttgacttaagaccccttttgtgctataatatcttcttccctacaagaggtatatttaatgtctaagaaagtatcccaacgattcaccttcccggtagcgaagctgatcttcccctacatcgtaactccggataccgagtacggtgaggtttaccaagttaccatctgcattccgaccaaggagcaagccgatgaactggtagccaagatggagtccaaagatgcacgcctcaagggcaccatcaagtacaccgagcgtgacggtgaattcctgttcaaggtcaagcagaagaagcacgttgactggatgcaggatggtgagcgtaagtccgctgttatgaagccgattgtcctgaccagtgacaacaagccgtatgatggccccaatccgtggggtggctctactggcgaagtcggtatcctgatcgaaacccagaagggtgctcggggtaaaggcactatcactgccctccgtctccgtggtgtacgtctccacgagattgtatctggtggtgatggtgaggatgatccgctgttcggtggtggtttcaccgaggaagaggacaagcctgaggacgtatttggcgaggacttcgatgacgaagatgctcctatctaagagcctagaggatcatgaggcgggggtatgccctttgggctgcccctattgcttagctgattatgagagagtttggggtgtacgagtggtaagttccatagctgcatctaatgataaggtagaggtggatcccaatggaatcaaggcaggagatccgggggctaagctcgataagggcaaggtggatgttggaatcatcttcgaagcgttcccgagagctctttatgcggtggcacaagttgctaacttcggagcaagcaaatacagtcgcgggggttggaggttcgtcgagaacggaatccagcgatatgatgctgccttcggacgacacctccttgagcgacacaagggtaagtttttggacccccaaagtagtttaccccaccggtatcacgaagtttggaacgccctagcagccctagagctggaaatccaacaagaggagggttctaatggaacttctactggatccgagggctaagaccattcccagcaattactctgtcaaaggccttgaggtagacctgggggaaaccccaggctacagcctgacggatgctgctatggagaaagccaagcgtcaagagagtgaatactatgactggaaaggttacgaagctctagccaaccctgtggtagaacatcccgagtatcggtctaagggtgaagcatttgccctcaccaagcattgggaagaaattcttaagaaaggtccggagggctctagggatgatcgcggggattgatggtgacgtacttcgatacgagctaggccatatcgctatgaagaaggaacacatcttcgacattgaggtagttaggccctggcccgaggaagaagttaacgagcttgtagataaaaagatagaacaaatcatagagagagtaggcgctgatgactatgaagtgtacctcactggaaaagataatttccgattggagcttgcgacgatccgccaatataaggggactcgcgtcggaaatacaaagccacatcactggcaaacagtgtcagaccgacttaaggacaagtggggagcagtcactgtcaacggtatcgaagctgatgattggctcggggttcggggaactgaggagggggataactttacggcatgttctcgcgacaaggatatccgccaaatcaccgagtgccaccattacagttgggcctgtggcgataagcagccagaattgggaccctttcgtaacgagggccttggacgagtgtccgcttcttggagactctatgggaagaagaagccccaaaagtcctggaagcttgagggctacggtacggcattcctctatggacaactccttgttggtgactctgtggataacataccaggttgtcctgaaatcgggcctaagtcagcggcagatttgcttgggcaccttactactgagaaagatctcttccaggcttgcgcctacgagtaccaaaaggtctatggagataattggaaggagtaccttactgagaactttcgtctcctctacctcatccgagaccgtaattggtttgatattgaacagtccggtaacgagcttaattgccgagtaataagacattgggagataccttatgaagatggagaactattctattgaagaggcccttagagtatgtcgggaactcttcaagatcctagaggaaaccaccaaattcactggccttcgggttgggggtggattcctccgggattgtgacaacggggttgtgccgaaggacattgatatctacgttgtagagccccgtaccctccaagaggtcgctatccgtaatcgggtccgtgtagttcctatggcagtagatgaggataccattgaagttaacgtcatccgcttcttcaacgccattggtcataagaaagtacggttaggggataaagaggttaacaacgattaccccaattcgtttaaggtttgggagtcttgtgagttccccgaggggcacctcccggttaacctgattgtatgtaagcaggagcactcctgcgtatttgacattggcctgtgctgcatcagtttttggaatggggatcgtcagttgctctactctcctgattacactagggataagggcaataagtggcttaccctcattaacattgctgacccgttgattggccacactgttcatgagaacgttatctcagatggagcagtagaccgtcttgtgaatcacatccgtagggtcatggagaaataccctgaccataaagtcaaactctcggataaccttcttgcctgggttaatctaaatggaagtactactcagcagagtgtactgaaggttatcgagagacttcaagaggagaatatcattgagcgtccaggggagattcttccggcccaagctgaagtcattgattgggacgccctacgactccaacaccgagaagctcgtgcacgagacgatgccgtcgttggagttcaagccgaagccgctaacctacgtggtgaagcacaagtactaccccgacttcagggcatctttagagactggctcatcgacgaagactttgctggtcgaggtcaaggggtacttccaagaggcgtctgaagctgccaagtatgtatgggtgagggagagtctccccccagatacagaacttgtgttcatcttcgagaagcccgatacagcgtgccattggcttaagaagcgtaaggatggtacaaagcagactatggcggagtgggccgaacgaaatggcttccgctggttcactctagagactttcaaggagtccttccataatgagtaagcgctataatgaagataccctcgtcattgcggatacccaagtccgcccaggggtcaacgttgaccacctcgggaatctcggggaatggatcgcacgtaaccgccccaagcgaattgtgcatattggggaccattgggacatgcccagtctgtcaagctacgaccgtggtaccgccaagatcgagggacgtcgagtcctcagcgatatccaagcgggtaatgatgcgatgcggctgctgctcaatcctcttcgccgcctacagcgtcaccaagcgagttgtaagaagcgagtctaccgaccggaaatgcacttcttcatcggtaaccacgaggagcgtatcaagcggtatgagaactctaaccctgctctccaaggttttattgggtacgatcattttgatctgtccgattggattgtccatgatttcctcgacgtgggtgtcatcgaaggtgttgccttctcccactacttctataaccccaactccggtcggccttacggtggttccgccgagcatcgcctcaataagatcaagcggagctttgtccaaggacacgagcaggggttcaagtaccacatcgaggcagtaggaaaggagcgtatccacgggcttgtagtcggtagtttctacacccatgacgagtcctacaagggcccccagggtaacgatcactggcgaggtgtagccctccttcgtaatcacaaggatggtgagtatgacctcaagctaatgtctgtaggtgagttcctgtgagtaagttcctacctgacatttactacatcaagtcggaccatgacttcggtcaacggggattggcgtttaagacgcctctctccgccgagttgtggcttgatatgaagttcgggagagggggtgctgctgagggtaaggcccgaggtatgtactctattgaggtcctagaagtcctctacattcccagcatccacctaccggatatcaaggggtaatcatgagagatcgagtaggacgagaacttaaggtgggggataaggtagtttttctggttcatcggaatacttcctcccatctagccattggggtaatcgatgggtttacccccaagatgatccggatcaaatgcccaaccatgagttggaccattgactctgagtatgtactcaggactagcgataaggtggtgtactatgacgaaagctgaactagaggatcttctgacagaaatggagggtcaactggctaagtctgatgcaaagctagcgaccttcaagaaggcagccctggaggctaaagagcggttggaaatgctggaggctatgctggatctggtggaccaacgatcctctgtattctatggagattggaggggctatgaagaacgatcaaaaggctaaaggtggtttcccgtggacatacatattcgtatcgatcctgtttgcgttgctggtctatgtgggatacagttgactgatgttactcctgacgatgggagaactcttaagtctattcttcgagatattgtcatgggtgggaagtttatgaaatatcgtgtaaagcaagttggaaagtacttcttccctcagtataaaaaggcgttcctatggagaaactttgagagtgaacataaggaccccttccgcccctccctcagtgacataaccctcccggtaatcttcgaaaccctacaggacgccatgtgcttcattcgggacttcgctgataccaagagtgagagtgtagtcaagtatcaccccgtagaggtctgaacctaaccaaaaaaggccccaagggtaaatcccaaggggcctttaggttagccccgaagggcgttcagaagggtgttaaacttatccacaagggcctcgtggctatcctgataagatgctacggggatatccttgatacggtcttcgatagcagccttgactactgcatccagacctacaacttcggaagccttaggtttccaattcccaggcttagcctcattagccttggatcctacctccagaagctccggcttcccatcaatatcctcccacttcacaggctcaaagtctttcgggccaatgacttgtcggagggtcccatcttcattacgtacagcaatagacttcgattgaataacgaatacactgttgccgtcgttgtcagcgatataacctgccataactaactcctaattaaactgccgatttgaaggtacccacggtaccaccgaagggatatacacggacagtgcattccccgaattgaccatcagtttccgtctggttacccttagcgtaccaagccttgtccggagatacagcaaacttgatcttagctgccgatccctgtataaagtggaagtgacaacctggggttacatcagggccaagggtgacggtaatatccgtagtcccctgagacatgaagaaccatccagactgttgcttagtcagggtgatgttctgagtaagctgctgggtattgacgacgttaccacccaggtgagtagtcacaaggcgggggtcaaggtagttctgttggagagaaccaatgttcttcacaggaccacgcatgtcgtcaaactgctcgataatgtagtcaccgatagtaccaccgttttggtcatctggaccaatcacgtgcttgatagccacgtaaacacccaggtgttcccgacgggggtctactcggaattcactaccgaaggcagtaccacaaggggcctcaaccatggtctcagagaacaaaccgatgacgtgacctgggtctacgttaccaccagaagtctcacctggagcaccgatgagggtgttcacgaggacgctggggattaccgcttccgagggatggtctggataagaggcagttacgttctctacaaccagggctgcgttctctttaaccgcgtaatagtccggcaggaactctgtagcagttacaatgttggtattcactcgtccagcatcagcagtaatctcaatgagatccccatccttattacgacggaatacctggggtacgtccacgacgtaggctcggccacctgggccggctgcttcagtttcaacgtaagttgccatatacttctccttatagatccagagcgtcttccattgcttccatacctgcaacgaaaggacgggccggagtttgcttatacaagaacttccaaatctcaccagcggaaggatcatcattgaaggatgcaatagtcttaccagcagccaaagcaccttcggtagctgcacctgcgacaggacccaggagtacctctgccggggtagtacctctccggtaagctgttagcatatcgtagatcatagaggcctggagtggcatctgttgcatcaatacatccatcatcctttgctcttctgaccgagtatcctcacgactagagccaccaaacttagccatctgacggagttcatcctggatataacccaggctcatcatcagaccaagcgtgaaggctacacccgcagcccccatcccagcattggtccaagaaccagtgaagtggggggacaacctacggcgcatcatcgggaggataatgttaccataagctgctggataacccttcagaagtccgaacatctggacgttaccattactcatccacataggcttgtcagcgaaggtgggatcaaggaccgtctggtctacgaacctgcggatagctagggtcttaacgttgttggccatcagaacctccgaaggggttgctggggataccaacttgagggcatccgcttggctactcacgttcacacccatttccctaagttgagcaaccttaagggcaccgttagctgaactaaagggaagcccagatgcgaggtccatgaggttgttctggtagaccctcttggccgtctctgtggcaaatactcggtcaacatgggtcaggatagacagaccattgaccaagaacatcccacgtacagccttctgagtgtactggttgaatacctcagcaccaacccgatctgccatcaaagaggtagcagaagctagtgtgtggttcatatcactcataagtctcccagtctcagacttggggatgctgctgaatacactacgagtagcctgacgggcaacttcacccaccgttggaagaacagcacccagggcagtcatgggaccagccttagcaaatgggatactgaactcggtcagggtagagagaccagccaaaggaagacgagacaagaccaatccaccagacactacagcagccagcttcttgatattcggatccttgatacgaccgtgcataccgttataggcatccactaggtcatacatccggtctacttcttccttagttactcgcttaccattttgttgagcctctgctactgccgaagcaatcatagcattggccttctccccgttgataccaaaccgctcggtaaaggcaatccggtgggaagatccctcgaagtaatcccggatctcttggatgaggtctttaggggattcattgagggtgtatttattaaggatctcctgaggtacagatccaaaggaacgactttcctccagttgaccatacttaggtactgcatcactctgggcaaaccgtccccgaagggtatcaggatctccctggatacgataccgtggatctacttcccaagcacccgtagtctgattctgagtaactaggcgggtaacttctggagcagtattacctcgggtatcatccgaagtctctgccagccaattagctacagcgtcctcagcagcctgacggtcttggaaatagggagtaatgtcatcgaggaactcaggggattctaccttcttacgggacagtccaaagggcatatagttgacgatattcccaacggacatacctcctcgaccactagcctccgccctaacatcattcaagatatcacggagggcggtagcctcaggggtattgacgcccatagaggcatcattgatgatctggcggatctccttattcgacttgccttcgatgatgttatccagggcagtgttccacttaccagcctggagttcctgatcctcgaagatagtcttaccagaagccctctcaccactcatgtcagccctaaaggtctcagagaatgcacgagcaataggggaggccttggcaagtggctctagaagggccgtagcttcattacccatggcatcccaggccttcctgatagtacccctaggctccatttcggaagccgtaggagcagccgcaggggcgttaggatcggtatgggctgaacctgctgcatccttgttactggccatggtgttaagaccagaggatacagcacccccacctacacccatggcagacccagcgaatgcagccgtcaggagattatccatgaactcttctggacgttgtacttgtcctactgcatcataagcgatggtatcctgtagggcctgttgagcaccagaggtaacaccctcggctacaccagagacagccgcatgcttaccagcctgagtaacagcctcaatggcagtctgcttaggtaggcccgattggaccaacatttggtaagcgccatctttaccgatgtgcttgagtagtggggcagcgataacaccagcacccgcagtgtctagtaccgagagtccagcaccacccaggacagcagtccaggggttattaccttcggggtcaagctccttcatttggttgttcagagcacctacgttgattcccatggagcttaggaaagagccgataagggcaccacccatacgaccaggggcaccaaacatggatccagccttagcacctgcggcaccaccagccattacggctcccatcgaagggagagcttctgagatattattctttaggaaagaaccaatggagggaatatcttggatatcggcaaaggaccgaacatctggggttccgtactgtgacgcctcctgggcattctcctcagccatctgagtgccgtagtctttgaggtagtcactaccagtcaactcaccaacagtagcaatagtgccgccgatgttagactgcatggtatcgatcccacgattgatcgcagaaccgatagaatttggatcagccggagcagccaaagcgctcaggtctggggcagcttcaggtacaacctctggggttacttcctggggagctacctctacttcttctggctcattcaacgaagccaactcagcggctacatcgaggtcttttacctcagccagttccgcagcaatagcggctttcatttcaggggaaagagccataagtcacctttttgctggaatagaagataagcaccttaagactatcttaagataacctaaagatttaattaataatacaataagttattaagataatcttaagtgcctatagatctattataccacagttttaataccttgtcaagtaccttttatcacttaggggcaggacgactcaaaatacctgacccccagccaaaaagacccgacagttgcttctgtagcttagccgcttcctgttgtacgaaggtaacggggtcagccccaggattctgcctcaggtggttccgaagcttctgggagatagccgactggtcttgttcaccaatcttagcaccacctaccagatccgaaccagagacacccttgaccaattcattggcatccttagtagagatagcctcaccacgggaagccgaagcagcagccttacgtgcagcagcactgatcttggcagtcttgagacgtaccgcagaatttagctgagcattctcttgagacatatcctggccacgtctagcggtttcagcctggagctgagcccgttgggtagctaggtcttgaccacgctgggttagggcaagcttggcccgttctacagcaacctgtttatcccatttagctagaagaccctcgttcttccgagaggtttcttccgtgacgcctcctgggcattctcctcagccatctgagtgccgtagtctttgaggtagtcactaccagtcaactcaccaacagtagcaatagtgccgccgatgttagactgcatggtatcgatcccacgattgatcgcagaaccgatagaatttggatcagccggagcagccaaagcgctcaggtctggggcagcttcaggtacaacctctggggttacttcctggggagctacctctacttcttctggctcattcaacgaagccaactcagcggctacatcgaggtcttttacctcagccagttccgcagcaatagcggctttcatttcaggggaaagagccataagtcacctttttgctggaatagaagataagcaccttaagactatcttaagataacctaaagatttaattaataatacaataagttattaagataatcttaagtgcctatagatctattataccacagttttaataccttgtcaagtaccttttatcacttaggggcaggacgactcaaaatacctgacccccagccaaaaagacccgacagttgcttctgtagcttagccgcttcctgttgtacgaaggtaacggggtcagccccaggattctgcctcaggtggttccgaagcttctgggagatagccgactggtcttgttcaccaatcttagcaccacctaccagatccgaaccagagacacccttgaccaattcattggcatccttagtagagatagcctcaccacgggaagccgaagcagcagccttacgtgcagcagcactgatcttggcagtcttgagacgtaccgcagaatttagctgagcattctcttgagacatatcctggccacgtctagcggtttcagcctggagctgagcccgttgggtagctaggtcttgaccacgctgggttagggcaagcttggcccgttctacagcaacctgtttatcccatttagctagaagaccctcgttcttccgagaggtttcttccagagtaccctgcttaacctttagattaccaatccctagacgctcatcaaccttgtccttggctaccttacgctccagatccttctccttaatctgacgatcagcagcagcagcagccatcttctgttggttgataccagcctggaggttacgatcaagctgacgctcataagaagcagcgaacatatccccagccttaccagtcttgtctagggccgaagccagaagaccagtaccaatgagagcataagatacataacgagacaggtcatcattatccatagtcctcatctgggtgagctcttcattaacccgagttttaagctcttcgggtttaagctctacaccttcccgttgggcatcagcctcgactacagcctgggccatttcagggcggcttacggctccactacggagtccttcgatagcaccctgttggatcacctgacggttagcctcttcttcctctgctaccgctgcaccggcctctgaggccacctcaggggttatttcaggttcgatagagggttggttaggggtaacaccataagacaacaggccggctccctgggggcctcctgtggccttctgagctgccctctggcctacaccctgggcccattggttagcactctgggcaacctcaggacccatgttctctactgcctgagcagcttgagccatttcctcagcacgagtacgctcttggtcaccgatatcagcaggagttacagcagcctgaacacctacacccacaggaccaccaaggattcctgcgatacggcccaaggcaccacgaccagtagcttcagccgcaggtgcaacctcttgggctgcacgagaccaacgctctgggttctccagggctgcctgagcagcacgacggacacgatcaggaatacccgagccctctacagccagcggcagtttgttccttgcgattcgcgccatatccagttcattctgagcagcccgaaggatgctagggcgaattggggacccttcataagccatgctggccataggattaacctccaaagagtttacttaagattcctgactttgggagttgtccaaagccgaggtcttctgcgctaggaagaatgcccattcccgctcccatacctgctgcaacatttgctgcgccttgttcgcttgctcccctagccccttcgacagaaaagcttggtactgtttctggagtagagtcacttcctttcccgaggagagccgcgagtgctgctccgcccattgcgccaaaagggtttgattgtccactactagcttcctcacttagtcccgaccccaggtggacagggcggtaggagccttgacgactcaactgtacccgctcctgcccaccaccgatgttctgtccaatggtgaacagcttctgagttaaagaggccattagaacaacagacccccaactcgaccacctgcgttcatacccacagaagctcctgcggggcctccgaagagtgctcccagggaggcaccacccagggcacccagggcagaaccgaggccaccaccgccacctccagaacccttagtgacggatacgttagtaccacccatgtcgcccgagatcagttccttataggcgagaaggtcgttaagactaacgttgttctcataggcccacttctggagagcaccgttgatctcctgttgctcctgattctgtagcatagaaccagcgtcaacctgcatggcattaccagagcccagccctttagcgatagccgaaaggttacccaaggtattcagacggttctggttgtaagcctgctgatcttggaaggccagttgagaggcgttattctgttgattctggagcagcctagcggtagcaataccttcggctacacccgctcgggaactgccgtactggccagcattggtcgctcctgcacgcaggtctggacgtaccgtagtgtcgaagtcccattgcatctgctcgttggctgcaccaatggcgttcgccaggccagttttattgggatcgtaaggaccaaggtaatcagccagagagctaacacctgagctacccaggagagactggagggctcccccgagattacccaacccttcgatgccacccaattggagagcattttggtcagccaccggatcaaagttcggatcaccaccgtagttcgggtcaaagcccccattatgtagccaagagctggcacccgagagtagttcattgtagttaccctgttgataaggagtagaggtggaggtagtggtttgcttcttactaccccccttgtaagcccgaccatctagggcatcctctacgttgaaccccatcagccgtttaacattaaattggaggaagttcatctggagttacctctctatagaaggttacggagtcctcggtatacccaagcttctcaagggtaggcttccagccccgacgaccttcacattggataaaccgacagcccatcttctgggcaaactgtcccaggtattcatcaacctcggggtagtctatcggagtttcattcccaggcatcttaccactccagaagaagtgtaggatgttgcccaagggggcttgggagacttgcactaccccagcatatccactctcctcttggtagaagacaaaggcttcgtaattaaccaaagagtgtaccagatgctcaaagtcccagaatttacccaagtcagtcctattgaatgcccgagctagtgcaggggctacagtaggaagggagtcaatattctcacgagtaatcaaatgaatcatggagtcaccactaggggataagtaaacgtacccccgaagatagcaccttggggaattccttggataagcaaacgaccattagccgtaagcttaaacatcgcttggttgaccacagcagtttggattgtagcccgattaagtacatcaaagacttgatccaaagggggtgcattagggtctgagggtggtggataagtgatctggctttgggctggaatgatactggagaatgctgggatgaacagttccgcaggaggccaataggcttggggaaggtccagcaccgtagcaccgttagtatagttccctccagatgccagaagggtgatccacacttcatccttggctgaattcatccggtaggcacaggtgcccatagcctgatgattattagcaggggtgaataggataaaatcccctgggagatccttgggtttagtaccggcgagtttccactggttatccaagtcataataatagatacctgatacaggacctactaccccaggggcaaaatacttaaccgttcctggcttaagcttcttagggggctccatagaaaccccccaatagccatcagccacatcattgagagtctgtccaaccctaacgaattcctcattaaggaagggcagcagttcctcctcttcctgtggcggaatcgaggggctgtacctttgactcatcgcatacctgccttcggggccatttccaaagtatatccattgaagtaccaatcatctgctgaggcgaagtcaaacttcaaggcaatgtatcggcccacatgcttggtgtcaatcttatagtcctgcccaatacggtacgggtaaggccctttccatcggatacctgagccttgtacctgggcattacctacccaaatattacataccccgttgcctgtgatgtgaggtataacagcactgacagtcttcatcattcggtcatccccaaggtagatatcggatctctcaagggtactcgtgaatgattgtccagagaacgtagaagtctccccgaagaggaagagcttagcatcctggaaggacgtgaagatcatactagacttcgctgggttatacgaaccttcaccccagaccgacgtatcggtatcccaggggttggagtcgtcatcccagaggttagaagtcttagggtcaatgatgccataggctccactgaggacgttagggaggtctcggatactccaagtgttctccttccagttccagatgatagccctatcgcaatgcttcccaggctcagatcgagtcgaggagtagcatacccacatttcagtgttcacatggtcagctagcacaaaggtccgttggtagttatccgggttgatatccgagaagaagaacttacggacctgagcatcaatcacggattgcttctgtacaccgttgtggacatagacgtcaccatgacctacaacaaagtggttaccatcgaactctatagcgcagttaggaccaaggatacctacgtcattaaacagttgctggaattggaagatgtacagaccaccgatatatcgcatggaatatacagagtcttccttgtagatgatgaaggagtcacgaagcttcacaccatccacgatagcaccattggtatcggccaaggtgttctgtccagcatccttagtaggatctgttgggtcccaagaggccgggacacctccagcatcagctgaggtactccaccagaccatctggggcatttcaatagagttagacgttacattcaatccaatcaagaagttcttgaaggacttaagacgcctaaaggttgtattcgctgggaagttaggtagaaccctaaacacactctcagttggtggtaggtgatggggagggttaaccccatcgttagcaaagatgactccgttgaaggaacctacagaccaccggttggttacactcgcagagtatggacctggggacacatcaatgatggtagtcccatctgccaggtaaagcctcttttctgagcacaggagccagtatgggatgttgttccgaatgaaggggaacatatccaagataggggcctgggcagtatcaaagatgggggaatggcccagagccttctgagccttaccgttcttaaaccggacgttgttcccgaaggaccatttatccaggggcaggtcagcgggtgcaatatcagtcacgatccccgttgggttcttgacctcttgtctctctagggccattttatacctcagttcttaataatgaagaatacagcacagaacggcgggatgttgcccaggggcatgttgatcttaacagcgtgggtgtgtgcctgcccttgaccagcagggccagtctctaggttggtattggcagcgttaccagaaccaccagtcaacgcaccagaatcaccagcagaaccagtaagggtggtagcccctcgggtacgccaagtgtgagtgtgtgctgggatttgggctagcgtaagagcgtgaccctcggtaagaccttcccatacgatgttagcgttaccaccccgagtacctacagcttgggatgtaccatcaataccccaggggaatgctccgatgaggttaggtacggggattccgttagaggtagtccctacgccattacaaagtttccaacctgctgggatctgagcaagagtacccgcccacatgataaccatcccaggtttaacatattgggtggtatctgcgactgagttcaattgggctgctgttacggtgacagcttggttaatattggggaaggtattcttaatggcactcttgatgaggcgaatatggtcatccccaaaggacttcagatccgagccggtagggttcgtaggcaccaactgatcgatatacgttgcgacctcaagacccattcttggcctcctttaactcttctttcatttctttacgggtgacataccgctccccaaagattgccatagaaatctggagttcgctcaccgcctgggtgagcttctccgtggcctggatgttgcgttcaagcagagcctgatgcacactctgaccgacaaccgaggaacctaccgtcactaccgaggataccaccagggcactgacgatgctgcccaagttatcagttagtagttgcatcctccgacttctcctttagattgtcctccaggactttaacaaactcgtcatcaaccttggagttagtcttctcagccagggctttagcaccagtcacgatggacttagcgattaccttggttgggaagagggtagccaggaggttgattgcgagggttttgagaaagataggcattggatgctccttaacgttcgatatccttgatcgccagtcgagagctagcgaagtcagcggcattctcttcattctggagttccatgactgcccgttctagtttctgtccccagaacatcgaccgctcttcatccatggtgtacagatagatctgctcaaggacaccatagaggtaaatctgcgggtacttagtcagggcccaagttgttgggttagccaagctcagctctgggagaacagtccagtagttcacaatgaacggggcaccgtcaggaacaacagggtatactcgccagaagttccccaatcgagtgtagtaagttacaccctggggctggtagttgtagttaacatagtgggagaagatatcttgggtgatgtactggagagtacgtccaccgatcaaggcatcccctgtgatagatcgaagggcaacaaagtgctcagggatctcgatgcccccaccaaaggccatcagggtttcaaagtgttcgttctcacgtacccgcaggagacggttgagacggtcagtagtatttccaatgaacaacatcagaagttcttgggtaaggtcctgacggtcagaccactggattgcggcaatagcgagatcagttacgttattaatcgtagccattattatacccgtgcctcagaggtccgcatacgatagttgtctcggtcgttaagccaacgggtaaatcgagcggcatggtcagggtcgcaaccaatcaggttaaggtcaatggggccaccctcagacattggacgattccgtagtgcctctacaacaaccagcgggatactagcaaccttacggaggttatccttacggttagtgtttacacccgaatgacgctcttcggcgttagcggacaggattgactcaacatcttgagtatcctttcggataaagagcccaaggtcttcgtcaattgcataagtcgattggatactcatgatgatctcctataggaaaacttggggccccgaagggcccctctagattacagctgggctacgacgtcgcggatcagagcaccggacttctcgttgtttacacggaaggtgtattcaaccaggagttggcgcttctcgctgtcaccggtcttagccagttcatgctggaagaacggacgcaggtagcagaggctgtgcatcttcggatcgaagacgaacagggtgttctcgtggaaccaacggttagcacgaatggtgtacttaccgaagtcactctcatagacgtctacggtctgcgcgatgcggttatccgaagcgtccagggtgatctcagtagcacgacccttcatgttcttgctgatggctttcttgatcgagctcgaagtctggatcgagttagcctgaccaccgttacgccagatcgactccgaggcattcaggagcatatcttcggtcagcagtcgaagatcaccagcagtaccagtgttcgaaccgtcacctacaggggcaacaccgttggcacccagggagccgttggtcttgtagtaggcgaagatgttagccatctgacccggagtagtggtgttacgttggaccttagcctgcggggcaccgaccatggcgtattccatgtccagcttcaactctttggacttcttagccagttggtaagccagttcgttcttacggccagccttcttaacgcgatccgcagtaccggtgacttgcagggtctcgtcagagatttggcagtagttgttcagcatggtggtgaagctaccagccttgatggttgcatcctcaccttcgactcgggtgttcttacccggctgacggagctcgtcagtctgccattcgtgggtgatagcggtagctacacctttgccgatagccgacataaacggggtgtcgtagggagcgatgttgtagatgatatcgataaggtcttcgcgcttaccgttgatctctacagtggagacggcattagttggagttgccatataatgtacttccttctattagaaaatgtcgagagaggagaagagagcagcagcggcttcaaccgactggtctttcctcagattagcacgggcagctttaacccgcttagaaccctctgaggcttccgccctacgagctacaggcttaacagcagcaggtagttcagtctcctccttcttctctagggcagccttgcgacggacctgagactcagcccacttacgtgctgcatcaagtacagccagttggcgggcatcagcaataccccggatttcatcctcggagtagccaattgatttgccgtaagctacgatcttatccccccaggtctcatcagtagtcatttcagggatcagcttcttagccaactctgtctgacgtttgatgtaggaactgtggattatctcggctcgcttctcctgcatagccttgatatcgttacgacgtttaataagtgcctgggcttgatcccgagcctcaagagcctctaggcgaagcttctgatacttctccggatcttgagccttaagttgctcccagtttatgctatcatactgattagcaccagcaatagcggtaacagtgtactgctcaagctcggccagtagattagcacgttcagcatcaactgattcaagcttagctgcatactcttcctccagctcagcctgacgggttacaaactcttcattgcgaaggtaaccactcttgagctcttcgaagttgacctcataaatatcatccccgatcggaatctcaaagagtttctctgagaggtcatcctcagcatcagtctcaggttcatcttcggattcaccttcaggaccttcctcagactcttcctcaagttcatcctcagactcaccctcgggggtttccttttcaaccccttcctcttcttcctcacctacgactttaccatctacggtttcatcaccgggggccaggaggtcatcaccgagcaactcaccaaaggcttccgctgcctcgaattcatccatgccttgattctcaaggtccattacttatactcctttagggtgatcgaatccaagattgcctggatacgaagttgtacgcggttaagggcgtggagctcgtggtatatcgcctcccgagtctcactatctttgggggccgtagccttccactcgccctcaatctcctcttggacaatacggaaaagctcaggaagaacgttctcacgtaccatctgctgtgctgcatcagacagcactagactatagccaaaacgttctcccaagattatttcctcactgccttagtgggcttcttagtttcaggcaccttaccgtcaccgatataggcagccctagcctgagtagcctcaaggtgatactccgcttcgttacgagctcgctcccaagtgaaacgatcacgctcaagttgtagttcagcttccttaagggtcatttctcgttgctggaggacagcctcctgcttcttcaactcgatctcagccagacggatctgagcctctacctgcttcatctgagcttcagcttgcttagccatcgcatccgattgggcacgctgggcatctgcttgagctttgatatcctcaggcttaggttgggcttccttctgctctcgaattgccttggcttgtagggcctcgtgagagttagggttagtccagaagcgatccgggtctttgtacccagcattctctgtgacttccttaaggatgttgtaaaggttctgctcagagacaaggaccccgagaccaccacctccgactacggcctgggccatttcccagatacgcatcaggtggagcatctgctggtctttgttcatgttaccaatacctacagtaacagtcaggtcagacctctctcgccagttggcagggttaacagcaacccacttacctcgtagctggaagacctcttcctggttctgatacttaatggcatggtcatgcagaagttggaacaaacgcttaacaccagtctctgcaaacatccgggcaatcaggtcaatctgttgctcagccgcagtcatcaactggttaacactcatggccgcttggttagagtgcagggtgttctgatctagtccgcgagtacgatcagtaataccagtacgcttaccccggtctgcctcaagtcggtcaagcatcccatagacttccccggacaactgaggagtctccagaggggtgatgctattcatggacttaactcggacaataccagccgcctcgttggtcagcaagtcttccaagttaacctgaccatccaagactacagaacgaccctggttggtacggtagatgttatccatgatgttccgcatgagtaccgaacggatctcttgaatgtcacggatcttatcgtagacactcatcccgtggaacttatgggcaatacggtaggcattcaggtcagcgaagggacggcaatcccaaggctcgttactgataatgtaatcacctacatagaggatacgacggagttcagagataccatcaccatctacgtccagtagggtgtagcactcagaggcccatacctcacggttagcctcagcgtcatccccagagttatactggagttgacccgtcatatcaaagttatcccggactaggcgctcaggctgactatcggagaactcatactcatcgtatggaagctcttcgataacatcctcaggaacccccaagagtcggagatcacttacggtgtacttctcacggtgacagaggaatcgggcatcatcgatacaggtcgctagtctatctaccaggaagttctctggcttaacacacaggactttgatttcccttttcttcttatccttacgaatcttaatagtgtaggtgccatcatcatctacactttgggccaggatagaggtatctgggtcagacagaatgtccgctaccatatcctcagagaggcctgagaatcgttcgaaggtgggctttagaacctcttccacgtagaccttaacaaccccagtcttcatcatgagggtgtcttggaaccagtcgaacattatcttgaacccctcgttcttacgcatgaagaggtagttcacatactcagtctcttgctctgcctgttcaacatcctcggcagtatcaggctcatatttaactacttgaccaccagacgtgaacaccttcataagagaaggcataatccagtctacggtctcttggacgtccctagatacaatcccggacttaccagggcgttcattaccgaagggctcaccaaagtaatactttagggcctcagaacgctgcttggatagttccgaagagttgaagtctagagcgtcattcacaagttggtctagatgacgaagtacctgttcatcatccataggcttgatcttacgacgcttagccatttagacaatactcccaaaccaatcagggatcaaccttgcggtatcactcctgtagtatccactgtttcgtacagcaccgggacgagcgtgtcgggaagccatcagaagggcataccgagttgctgagatcatgtcatcattacgatccacaatcttaccatccttacggtggtacatcttcatttctttgaggaagttagtacaagtattgaataccttgagatccccattctccatacgagtaagcatccagttgacaccaaactctacagagttacccccgtgtttaccatcaggacctggggggttgctgaagggttcataaacaacattgaggttgtggtcatccttcaggaggtctacgaagcgacgacctgaggtagctccatcatgcttaaacgcatcgtgggggactacaacagggatctggtgaccacccttgaggtagatagcatcagcgtgcataccgagggtttcgccagattcacttcgttcatcatacaggtaatacttgtccttctctgcatcccaggctacacaggcaatagcgttagggtggtcaaaccctaggtcgataccaatgatcctatggaagtgatccgggatatcaaaaggctcacatacaaacttctcttccagaatagggaagactacaccagagccgagcataggaataccctcagccctcatcctgcgttctgctggagagtataccgagagtagctgctctttaacttctggactgaggtgtggggcatcttcccagcttgcatggatcaagaactgaccaggtttaagatcctggaggaagtccttcacgatttccgttagaccatgctctggggtaaaggttagatagacaatacccccagtagtagccgttcgggttacacactgggtataaatgtccttggggcactcctcgtcaagccagatgacgtgaatagcagtacccatgaatttgtcttgggacatttcgtaggacttgaagatcaaagaggacaaacccccagatacgtgccttaccattacagcttggacgcatccgggtttgccttccctacgttcagtctttacgatatcctctttggggatcatcccggttccgaacgcctcggggttcttccaatcacctaatagttcagactggagaatgtcccgagtagtatctgtggagatccctgcggcccagcagtttactggcttgtcaaatttccttccagtccaccactcagggtaacgaccggtaagatgacaggccatgatgaaggccccggtgtatgtcttaccacagcggttaccagtcatagccagtagctgagcacaattagaagaggctgcaatgaacttctcttgccacccatagggggtgtactggttcatgcggaagtacttctgccgctcagccaactctctgactaggttacgcaaccgctcttgggtatccattaagtcaccgtgctacctatcgtagatgctcgccaaagggctcgttggaggtcccttacgcgaactggggtttgtttagcccaggcactatcctcggcttcccaagctgctctgtcgaactccccggctttcagaaggctccacgtcttggggaacttcttagtccatgctgtaccaagctggaagttaacgctcactagggcatcgaatagttctggagtgcaaaaaggcagctcagacacttgccgttgggctgcatcgtaggctgcctgactatcattctctagccaagtctctgctcgggctagggtgatgggtccatcctctccgggacgctgtaggtggccgtagcctccggtccaatatcccaaggagtctttgtaccactggagtactaacccctctcgcttcttaataagactcaggaagtcaagcggtcgggaaagaaaggactttagccaagtctggctcttcgtcgagtattcgtcgaacttcattcatcagatcctctgcggacatatcttccacattcttagtggtaagctccactttctgcttagcaccgaagccacctcggtccaggatatcctgggctgccttgaggcggataccacctttctcatttggatcttctgcaatagagacgatcacacggagcgccatagggacgtgactcccgattcgctctgagataaaggcattgatgtactcggcatgtttccgatggtaagctgcaacgttgcgttgagcatgattgggggagaacccagcggctatataggcttgggttttgtttaatccatcggctagtccttcgcaataaaggtctagtttttctttggcagaaagaggagcggcaccaatcgagacaaccttttcgtctgacatacgcacgctcctatctctctaatgtcaccccggtaggattcgaacctacgacctcctgcttccaaggcaggcactctaaccaaactgagctacgaggagttgttggcgacccattggggattcgaaccccagacttctccctagacaggggagcactcttaccgctgagttaatgggccataatggctgggacggtagggctcgaacctacgaccggatagttaacagctatctgctctaccaactgagctacatcccaaggaaatcttaagcacccttaaggttaatttctcaaccttataatactattatcccccagagtcccccaggctaacgttggggtggccctctcccaggggtactagcccctagggcctccccaggataccataaggctagtccgggggtcaaccccttgagctaccgttcatcggattagtccaagggtattcataagaaaaatcttagggtattcagggggtggatcggggggaat
